United States Patent Application Publication US 2025/0051766 A1 - sequence listing, part 22

SEQ ID NO: 5065 - DNA, 58617616 bp, Homo sapiens (residues 43,420,461-45,591,483 of 58,617,616)
  source 1..58617616: mol_type = genomic DNA
atggagtcacaccaaactgccccttattttgttcctaaatatgtagctgcaaagatttagaagtctacacacctccccagcaggccttgctcacaatttggccacaaggaaattccttgtgggccccaagatctttaccctaaaacagttctgcttgagtttcaccctggcaatgtaattaacagtttatcttcacaggtactggacaagacaggaccagaagtcatccctctgctcacctgagacaaatgcctatttcactctttcctctactagatgtttagtttattttatgtaaaaatgcaaatctggccagacacggtggctcacccctgtaatcccaacactttgggaggccaaggcgggcagatcacgagctcaggagtttgagaccagcctggccaacatggtaaaaccccatctctactaaaaatacaaaaatttaccaggtgtggtggcagatgcctgtaatcccagctattcaggaggctgaggtggagaatcacttgaacccagaaggcagagattgcagtgagctgagatccggccatcgcactccagcctgggtgacaagagcaaaactccgtctcaaaaaaaaaaatgcaaattcactgagggcaagatgattgcatagttgactattcctctaccctctcctttcacatgtaaaatgtagattcactgaaagctgatcaaagcctcaaaagaatgcaaccactttccctttttatttactctcctcctttttttctttcctctttctcctattgcccactcctttccccactttaaatattgaagtccccaggccgggtgtggtggctcatgcttgtaatcccagcactttgggaggtcgaggcaggtggatcacctgaggtcggagttcaagaccagcctggccaacatggtgaaaccccgtctctactaaaaatataaaaaattagctaggcatggtggcggatgcctgtaatcccagctactcgggaggctgaggcaggagaactgcttgaacctgggaggcagaggttgcagtgagccgagatcatgccactgcactccagcctggcaacaaaagtgaaactttctctcaaaaaaaaaaaaaaaaaaaaaaaattgaagttcccaaatcctctttggaaaaagcacagatcacagatgttcctgtggttttgtgtttctttttcctgggcatgtcctaaaccttagcaaaagaaactaaaataattaagactcacctcaatcattttttttttatttataccactctcctgcagtttaagcgctactctagctaattccttatctttgtccttaggtagccagtccccattgtgtcagtttgctaaatctccctaaagaggaagaagaagcacacgaaaatcaaattttaactgagggccaggtgcagtggcccacacctatagtgccagcactttgggaggccaaggcgagtggattacttgagctcaggagtttgagaccagcctgggcaacatagtgaaaccccgtctctacaaaaaatacaaaaattaactgggcatggtagtgtgtgcctgtacatagtcacagctatttgggaggctgagacaagaggatggcttgacccagggaggtggacagtttgctgaggtcacgccactgcactcctcctccctagatgatagagcatgaccctgtctcagagacagagagaaagaaaaaggaagaaaggaagaaaaagaaagagagaaagaaaggaaggaaggaaggaaggaaggaaagaaagaaagagaaagaaagaaagaaaagaaaagagaggaaagaaagagaaagaaaaggaaggagtgacaatgccaaattctggagaggaattgagaaactagatctctcatatattgctgtaagaatgtgaaatggtgcacccactctggaaaatagtttggccatttatttaaaaactaaacacacacttaccatctacccagcagtcatactgctgagcgttcatccacaagaaatggaaacttaagtcaacacaaaatcatgtatgtgcttgttcttagcagctttatttgtaatagcccaaaatgaaaacaaccaaaatgtcttacagtaggtgaatgttaaactccacaatagaaagaaacaaactatttatacacacagaaacttggctggatctcaatggcattatgctgagtggaaaaaagtccatctcaaaggtcatatatgtactatatgaatccatgtatataatattcttgaaatggcaaaatcatagcaatagagatgtattttatttaactgaatggtatatccaaaatattaccattaaacatgtaatcaatacaaattttaatgagctatcttacattcttttttatactaagtcttcaaaatgtggtgtgtatttcacaatcatgatacatcttaatttggacttgttacatttcaagcattcagtatccacatgtggctactatatgatatagtggctactgtattgtacagcacagatctaaataacataaaatgcctcttcaaatggatggctcttttttatcgtgatgtttattttattattgagttttgagtatgtttcatatttgcatattacaaatgcaaattccttaacaggtatatcattttaaaatattttcttctactctgccttgtccttttcttctcttagtgtctttc[137 bp omitted]gcctcctgagtagctgggactacaggcttacactgccataccaggctaattttttgtattttagtagagatggggtttcactgtgttgtccaggctggtctcgaactcctgagctcaggcaatccacctgccttggcctcccaaagtgctgggattataggcatgagccaccgcacccagcagagcatgggtttttaatttaatgaagtccaatttatcaactttatgaaatatgcttttagtattatatattatacattagccaagtttgttattgcttgtttgtttgttgttgttgttgtcactgctattctaagtcgtttgcatttccaaatgaattttagaatcatcttgtcaattactacaaaaatcctgcaaggattttgattgggattgtttgaggagaattgacatcttaacgttaaggaaacaggagcataggagagccagggtgacaccattttaaaatcaaccctgtcgtaaaactagcaaggtacgctctttgccaatcacaacccacggtcataagatgtttacagctaaagaagcagtttattaatgcctgcaaggacaaactcctgtgacagaagaatgtccagatgtcccaatatcacataacaatatatactttcaagacagagtcatgctttggtgtacttatgcactaaaatgccaagaataacttttatttatttatttatttatttatttatttattatttttggagatggggtctcgctctgtcacccaggctggagcgcagtgacatgatctcagttcactgcaacttctgcctccccggctcaagcaatcctcccacctcccacccccaccctccagtagctgggactacaggcgagagccaccacacctcactaatttttgtattttttttgtagagacaggaccgcaccgtgttgcccaggctggtctcaaactcctgggctcaagcgatcctcccaccttggcctcccaaagtgctgggattacaagcatggtccactgcacctggcagataactttccttaaatcagcaaaataataaattttgtcatgctgtcagcccactcacacatagacataacttagcttagcttttatat[135 bp omitted]tgaccaacatggagaaacccggtctctactaaaaatacaaaatcagccgggcgtggtggcgcatgcctataatcccagctactcgagaggctgaggcaggagaatcgcttgaatctgggaggcagagtttgtggtaagccgagatcgcgccattgcactccagcctgggcaacaagagtgaaactctgtctcaaaaaataataataataatttttaaaaagacagcgcattctttctcttgctttctgaggcaaccctactgtgtaactaatgagcaactctgttgccaccgcactctgtgactcaccttgaattctttcttgcataagatccaaaaatcctctcttggagtctggatcaagacccctttttccagcgacattaataatactgtgtcttcttccccattcataccatatatcttttcatttatttcacaacagtgctgaaataaatgaaaagatatatgctatgaatggggaagaagacacagtattatttcacagtgtgaaatttccttcagcattgttgtgctgtttccagtatacaggtgttggcagggatatagaaaaactggaatgcatatattatgggtgggcacctgcatgagatcccaagaaacagcaactaggccagggtgactggagcagaggaaatgaggaagagcatcttaggagatgtggtcagaggtaacgggaatacagatctcagggagctcataggcaactgcactgactctggcttttatgccaggtgaatttggaagttgttagagagtttagatcaggctaggtgtggtggctcatgcctgtaatcaatcctagcactctgggaggccagagtgggaggatagcttgtgtccaggagtttgagaccagcctaggcaacatagcaagatcctcatttctacaaaaaatttttaaaaattagctgggcatgatggcatgcacctttggtcccagctgctgaggaggctgaggcaggaggactgcttgagcctgggaggttgaggctgaagtaagctttgatcccaccactgcactctgcctgggtgacagagtgagactctgtttaaaaaataaagaaagacagagagattgagggaggggagagagagagaaaggaagggaggaagggaggaaggaaggaaggaaagaaggaagggagagagggagggggcagtgcagagggagggaggggaaaagaaagagaagagaagagaaaaggaaaagaaaagaaagaagaaaaagttagtttatgtcagggtgtgatacgatgttttgacttctcttgtctaaggagccctctagctgctatgttgagaatagtctggaggaagacaaaattggcagtgggagacccactaaattgctgtttgccacgtttttaaaagctgaatagcttagatcagtagtttaggagatcgacaagacttgttttctggtcacaacgctgctgactaaaacaggatttagtccagacaggataaagtgaagaaactggacaaaaccagcagatgacagcaaaagtgaccctagctgccctcattgctcattagctcaagacactgcccccagcaccatgacagtttataaacgccatagcaacgacccagaagttaccacccatttctatggcaatgatctggaagttgctgcccttttcctggaaacttgttaaataactcactccttaatttgcattaatccacaccttaatttgcatgtaattgaagtggctataagagaatataaatgtagttgccaagggttcacaggttgccaactctgggcacactgccaatgagttatccctgctcagcaaggagcagtaccattcaataaaagattactgcctaatacccggggctcgcccttgaattctttcccggtcaaagccaagaaccctcccagcctaagcatcatgttgggggcctgtccatcctgcatcagtttttttgttttgtttttgttgctgttgttgtttgtttttgttttgttttgttttgagacagggtcttgctctgtcacccaggctggagtgcagcggcacaaacgcagctcactgtagcctctactttctgggctcaagtgatcctcccatctcaggctcctgggtagctgggcctccaggcacgcaccaccagagctggctaattttttttttaatttcgtagaaacagagtctcaccatgttactcaggctgtgctcaaacttctgggcttaagcgatcctcccacctgggcctcccaaatttctgggattacaggtgtgagccactgcactcagcgtgcatcagttctaactaccaaattgaaaggaacttagaggagaaaagagcatgttaaatgcctgtggggatggaactagcaaaatccagattatggaagctgcaagacaatgacctaactttgtcaaaacataaatttgagagaagaagaaaaaaaagtaagggaagctatagtttaagaggaacttaaacacacaaaatcaaatgcaatttgtggaccttgcttggatcctggcttgaataatcagatataaaataatacttttctgatacagctaagaaaatgcattcattgattatttaatgaggtaggtatcttaaattctattagatatgagaactgagatcatgtatttcaacatgacttacctgtttgtttgactttcaaaaaagccttgcctggaaggataagactgtaaaacaataaagaactcattgtttgcttcaggaaaataaaaaaaaaaaaaaatttatctaggcaaacaatttgctcacctgggcatatagctctcctctcaacacatggctcaactgggcaaaaagctcacttatcagacaatagtttgcttctcaagacttctctcaagacctccattctgttgtgttcaccaattctaaactatcgtctcatactttttatccaattttattttattttattttattttactttatt[246 bp omitted]aatacccttacatcattttcccctttgtgacactgttgagacaccaccgaactttgttctcccttgctgcaattggccttataaactcttactttgcgtgatcaatgggtttctctggtagtctttgcaagaaagtcaaccattaatagatacgctgatttcatgacatgtttattttaatttttttattttcttgtaactttatcgtcacagaatgt[133 bp omitted]gaaaccccatctccactaaaaatacaaaaattagccaggcgtggtgacgcatgcctgaaatcccagctactcaggaagctgaggcagtagaattgcttgaacccgggaggcagaggttatagtgagctgagattgcaccattgcactccagcctggggaacagagcaagactgcatctcaaaaaaaaaaaaaaaaggttgggggaggcttatctttttaaaactatatatacagaatggctgggcatggtggctcacatctgtgttcccagcattttcggaggcca[133 bp omitted]tgaggcaggagaatcgcttgaacttgagaggtggaggttgcagtgagccaagatggcaccattgcactccagtttgggcaacagagtgagattccatctcaaaaaaaaaaagaatatacatatatatatatatatataaaatctctacacacacacacaatacacacacagacacacacacacacacagagaaggatttacaaataaaatgaaataatgtctgagatttacttcaatacaatatggaatagagagtagggagaggcatagatgaagtgaaactggtcatcatttcgaggcaatcattattgaagctggttgacagctacatggggttcactataagacttttgtctggccagacgtcgtggctcacgcctgtaatcccagcactttaggaggccgaggtgggtggattgcctgaggtcaggagtttgagacaagtctgacctacatggtgaaacccagtttctaatttaaaaaattacaaaaaaattagccaggcctggtggcaggcgcctgtaatcccagctactccagaggctgaggcaggagaatcgcttgggctcgggaggcagaggttgcagtgagtcaagatcacgccactgcaatccagcctgggcaatgagagtgaaactccttctcaaaaaaaaaaaagctttttatctacttagatatatttctgaaacagtccataataaatgagttttatgtgtgctactcagaccacaacattggagttattcttgatctccctctcctatcccatatccaatcctttagcatatcctgttgattctgcctttaaaatacctctagaatctgaccatgtctcataacctccgctgcttcttctccagtccaagctgccaccatttctcaccttgattattgcaacagccaagagtctctatgctttgacctttcccttcccacaatcccattctcttctcgacttagcagccacagtgatccttttttaaagtaagcctaaaccctgtctcttagccaggcatggtggtgcacacttgtagtcccagctactcaggtggctgaggcggaagaatcgcctgagaccaggagttcaagactgcactgagctatgattgcgccactgcactccagcctgggcaacacagcaagaccctgtctcaaaaacaaaataataaagaaatgaagaaataaaaaataaactcgctctctatcaaaaccctacaatgactctccacctcactcggagtaaaaaccaaagcccatggccaggagcggaggctcactcctgtaatcccagcagtttgggaggctgaggcatgaggatgacttgaggtcaagagtttgagaccagcctggccaacatggagaaaccctgtctctactaaaaatacaaaaaattagccaggcattgtggcaggcgcctgtaatcccagctacttgggcaactgaggcaggagaatcgcttgaacccaggaggcagaggttgcagtgagccgagatcgcgccactgcactccagcctgggtgacagagcgagactctgtctcaaaaaaaagaaataaaaattaattaaataaaaataaaaattatcctaagggaagagagatggggccctgatacagaagtgcacagccccagacaccctcaaagccagcatggtctctgtgaaagatgcaccctacagcagaattctgtgaagggttcctgtggggcagtgccccccggtggacaatgacctttagacaaaggcattacctgtaaatgatctagtgtgctagaaggaaaagacattcaatttccatccctagaaatccaggaaatgcaaactaagacaacaataagttgcctgtcaactttataaacaaaagaaggaaatagaaactttgttcaaaacaaactttgaatgcagtgtttcactttctgggcatgtctcaagacaaaagactttctttctctttttttttttctttcagacagtctcactctgtcacccagcctggagtgcagaggcacgatctcggctcactgcaacctctgcctccaagtgattctcctgcctcagcctcctgtgtagatgggcttataggcaaatgactttctttagaagaccagaattggctgggcatgatgactcacgcctgtaatctcaggactttgggaggccaaggcgggtggatcacctgagctcaggagttcgagaccagtctaggcaacatggcaaaatcccatctctactaaaaatacaaaaattagctgggcgtggtggcaggcacccataatcacagatactcaggaggctgacgcatgagaattgcttgagctcgggaggcagaagttgcagtgagttgagatcacaccagtgcactccagcctgggtgacagaatgagaccctgtctcaaaaaacaaaacaaaaaaacaaaaactacaccatggaatgaaaatggaaaaaatgtttcctggtacctcctaaggctaaacatatgtatctcctatggcccagcaatccacatctgggaatatacccaagaaaaatgattgcatgtctacgtacacgactgcttctagcaactctattcatagtagccgaaaatcagaaagagcccaaatgtccatcaacaatacatttgaataaataaacgtggtatagtcataaaatggaatgccacacagcaattttaaaaaataacagcacatggaccaacatgcaacagcatggtcaaatatcatgacataatattgagtgaaagaagctagacactgccagacgcagtggctcacgcctataatcccagcacttcaggaggccaaggcggatggatcacgtgaggttgggagttcgagaccagcctgatcaacatggagaaacccatctctactaaaaatacaaaattagccaggtgtggtggcgcatgcctgtaatcccagttacttgggaggctgaggcaggagaatcacttgaacctgggaggcggagtttgcggtaagccaaggtcgcgccattgcactccagcctgggcaacaagagcaaaactccgtctcaaaagaaaaaaaaaagaagaagaagctagacaccgccagatgcaatggctcacgcctgtaatctcagcactttgggaggccaaggtgggtggattacttgaggtcaggagttcaaaaccaccctggccaacatggtgaaacccgtctctactaaaaatgcaaaaattagccagacagggctgggcgcagtggctcacacctgcagtcccagcactttgggaggccgaggcaggcggataacgaggtcaggagatcaagaccaccctggccaacatggtgaagccccgcctctactaaaaatacaaaaattagctgggcgtggcagcgcgtgcctgtagtcccagctactcgggagggtgaggcaggagaatctcatgaacccgggaggcagaggttgcagtgagctgagatcgcgctactgcactccagcctggcggcagagtgagattctgtaaaaaaaaaaattgccgggcgtggtagtgcatgcctgtagtcccagttacttgggaggctgaggcaggagaatcacttgaacccaggaggcggaggttgcattgagctgagatcgcgccactgcactccaacctgggtgacagagtgaaactccgtctcaaaaaaataaaaaataaaaagaaatgaaaagaaaagcaaagaagctaagccgggtgtggtggctcacgtctgtaatcccagcattttgggaggccaaggcagatggatcacctgaggtcagaagttctagactagcctgaccaatatggtgaaaccccctttctactaaaaatacaaaaaaaattgctgggcatggtggtgtgcacctgtagtcccagctacttggaaggctgaggcaggagaattgcttgaacccaggaggtggaggttgcagtgagccaagatcgcaccactgcattccagcctgggcgacagagtaaggctccatcaaaaaaaaaaaaaaaagaaaggaaagagaaagagaaagaaagagagagagagacagaaagaaagaaagaaagaaaaagaaagaaagaaagaaagaaagaaagaaagaaagaaagaaagaaagaaagaaagaaagaaagaaagaaagaaagctggacaccaaaagaaaagaaagaagctagacataattgtatatgcattttatataagcattaggaacaggcaaacctaacttgtggtgacagaaatgagaaaatggtcacctctgcacgctattgggtgggagaatgcacaaaggaaccttctaatatgacgggaatgctctatatcctgacctaggtggtggttacaaagatatgtacataaattcattgagctttatacttcagttttatgctgtaagttatctccattttaaacgttaaatttttaaagtttgaaataaaacagaatagaatcaacaactagtgtatcagtactttcaagatacgcaaaggatcagaatgcaggaccagcctggtggagaatacactggggtggggagaacagggccccaggtgctcacattccctctccagccacaagggggctctccccacctcagctctctacagccaaatcctctggaaaacccagccgcacatgacctcgcctattcagaaatgtcactgctggctgggccaggtggctcacccctgtaatcccagcactttgggaggtcgaggtgggagactcacttgagtccaggagttcaagaccagtctgggcaacatagtgagaccccgtctctacaaaaaaatagaaagagaaatacaatctcatgattcaaatatacaaccattgcggaaaactgtcagtatttagcataaacatatgcataccttatgaccttgcccttcaggtcctggcctacatacccaacagaaatgcatacatatgttctccaaatgacctgtacaggaatgttcctagcagcactatttgtaattgccagagatcggcagcaacccaaatgccctcaacagttagaatgaataaataaatcacagtggaatgctatatacatcaatgagaatgaatgccatgcaacaacatggataattctcataaaggcaggcacagtgactcaacgcctataatcccagcactttgggaggccaaggtgggagaattgcttgaacccaggagttcaaaaccagcctgtgcaacaaagtgagacctcgtctctacaaaaaataaaataattagccagccactaattattgctgcatcaatggcacaatcataattggactactgcaacacagcagaaaagaccgcaggctccctagacagactgcctgggtgtgagtgcagccttggctggctgtgtggtcttagacaagctacttaacctctctgtgccccagcttccccatctttaaaatgagccagctgggcacagaggctgatgcctgtaatcccagcactttgggagaccaaggtgggcagatcatgaggtcgggagttcgagaccagcatgaccaacatggtgaaacctcatctctactaaaaatacaaaaattagccaggcatggtgatgcgcacccgtaatcccagctactcaggaggctgaggcaggagaatcacttgaacctgggatgtggaggttgcagtgagccgagatcacatcattgcactccagcctgggtgacagagcaagactctatctcaaaaaaaaaaaaaaaaaaaaaaaaaaaagcctaattatagcacctacctcatccagttattgtgaaaattaaatgaatgattatttgtagagcactgagaacagtggccatgtattccatgagtgttacatgactgttttactataccctggtattggacactgagatttttctaatcattttatatttcagacaatgctgcaacatacacccttataaacgtatcatttgccacaagtgtgagaagtggaatagtgggatagtgggattggtgaaccaaagagggtttgtgctggttacatgaagagatgtcaaatttgtctccattaaagttgtaccaatttacactcccaccacaatgaaggagagagctgatttctcaccattaccctggttgtggtgatggtttcacaggtgaatacatacatcaaagctcatcgctgtatacctcaaatatgtgcagcttttgcatatcaattacacctcaataaagctattttttttttttgagacagagtttcactctcgtcacccaggctggagtgcagtgtcatgatcttggctcactgcaacctctgcctcctgggttcacttgactctcctgcctcagcctcccgagtagctgggattataggtgcctgccaccacacccggctaatttttgtatttttagtagaaatggg[135 bp omitted]atggtctcccttttgagaaacacgtagtggagaaggatgataaatgattcaactgggatgcagccagcaaaatcccagatgttgcaaaccctatgagaaaaaggaccctatttattcagcaaacgtactgtaagagaagggagtgaggaagagggagaatccaaaaattaagacagaattaagatactgatccatgaaatgcaatgtgtagatctttgtttctctcatgagttgaataaaccaactgtgcaagaaatgttttatggcggggtgtggtggctcacacctgtaatcccagcactttgggaggccaaggagggagcacctcttgagcctgggagttggagacaagcctgggcagcacatgaagaccatctctaaaaaaagaaaaaaataagtaacccagacatggtggtgtacctgcagtcccagctacttggaaggctgaagcaagaggattgcttgagcccaggaggtcaataggctgcagtgaaccatgatcacaccactgcactccagcctggataacagagtgaggcactgtctcaaaaaaaaaaaaaaaaaaaaaaagaaggagtatttatgagaccccagtcaaatttaaggcactgaccagatagttaattatattaacaagttattaataacttttagatatgataatatattatggtcattttcttttaagagttcttataagatactaaagtttttgtctcctcattatgtagcagtgaaatgatatgtttggggttgatctcaaattaattggaaagatagatgaaataagaaaagctgggtggttagggaggatcacttgagctcaggagttcaaggctgccatgagctatgattgcactactccagcctgggcaacagaacaagatgaaagaaagaaaagaaaaagaaaaagggaagggaagggagaaagagagaaagagagacagataaagaaaaagaaggaaggaaggaaggaaggaaaagagagaaagagagaaaaagagaaagaaatggctgggtgccatggctcacacctgtaatcccagcacttcgggagaccaagttgggtggatcacttgaggtcaggagttcaagatcagccaagccaacatggtgaatcccggtctgtcctaaaaatgcaaaaattagccaggtgtggtggcgtgtacttacaatcccagctactcgaaggctgaggcatgagaatcgcttgaacccaggacaaggaggttgcagtgagccaagatcctgccactgctctcccgcctgggtgacagagtgagactctgtcaaacaaacaaataaacaaacaaacaaataaataaatctaaaaacgaagaagaagaaaagagaagaaagaaacactgctctgaatctcttcctgctcttctccctccacatacatacctgcctcgaggttggtggagctctgtgtggtctccttttaggggtaagcagggggcaatttgagaactgagatgcttcaagttattccccaggcagggtttgggttcccccagaaggatgttagcctgaaaattttaaaagacatggcacaggtcagggattcccagggttttgaccccaatggggacacacaacaccctgaaaggggaccaacttcttccttcacagagccctggaaacacatcttagctttctggaaacttcttaagattctctaagtccctccaggaaatttggaaaaattcgtcctcatcaaggccatgcttttggtgtatgtaggtttcagccactttggtggatctgtactgtctcgagtcaactaaacgggtgtgggcggaggattacctaggtgccgaggcaagagactgaaggcacaaactgtttcagtataataaaaaaaaatagttagaataagaatagtcgtaatacaaattagagatagagatggtcatggacaattatcaatcattattataaacatttatcattagcttttaatattactcttcgttgcattactaatataacctaggaataaccggcgggtatacggtcaggtgctgaagggacattgtcagaagtgacctagaaggcaagaggtgagccctctgtcacgcccgcataagggccgcttgaggactccttggtcaagcggtaacgccagtgtctgggaaggcacccattacttagcagacagcgaaagggagtctcctttccttggaggagtcagggaacactctgctccaccagcttcttatggaaggctggatattatccaggcctgcgcgcagtcatccgaaggcctaaacccctccctgtagtgctgtgcttcaatggtcatgctccttgtccactttcatgctcctcctgcactcctggctcctctttgaagttcgtagtagataagggtagaagaaatagtgaaagtcttaaagtctttgatctttcttataagtgcagagaagaaaacgctgacgtacgttgccttccctctctctgcttaggctacccaagagggaagggcccccgtcctatgatcacgtgacttgcttcaccttgtcaatcacttagaagattcaccctccttaccctgcccccttgtcttctacgcaataaatatcagcgagcccagccttttggggccgctgccggtgtccacgtcttgatggtagtggtcccctgggcccagctgttttctctttatctctttgtcttgtgtctttatttattacaatctctcgtctccgcacatggggagaacacccgctaagccccgtagggctggcccctacaaggcagccttcagaaaggccaatggggctgaggaactgaagccttctaccaacagcaggcacagcctgccagtcatgtgaaggagccatcttagaagcagatcctccagctccaattgagcttccagatgactacagcagccccggtccacgtcaatcgataaatcaataaatgcttattagggctgggcatggtgacccatgcctgtactcccagcactttgggaggcagaagcagcaggattgcttgaacccaggatttcaagaccaacctgggcagcatagtgagacccccaactctagaaaaaaattttaaaattagccaggcatggtggctcatgcctgtaatcccagcactttgggaggccaaggcaggagtattgcttgagcctaggagttcaagaccagtctgggtaacacggcgagaccccatttctatttttttaataaataaaataaaaataattttaaaaattagctgggcatggtggtgcatgcctatagtctcagctacttaggaggctgaggcaggaggatcacttgagcccagcaggtcaaggctgcagtgagccatgatggtaccagtgcactccagcctgggcgattaaccaacattccaaatgcatcctcaggaacaataaatctctcaaatattgcctctacaggggaaaaaacccaaaggtccttaatgatgactcagagggaaggttgaaagatgcttatcggagagtttgagttatatatccatctgtctatctatgtattggggttcaccaactgtaaaagcatcgttgctattacagatataaggcactccaagcccaagagccctgagggtagggaggttactccagaagatcaggaaccaggaaacgcccacacccacagtaacggtaagaatgacagctgcagaccagaccagccctctactgtgatgctggagagatgagacccagctgggatccctggctcaggccctcatgccaagacagctgtctctaatctgccggtgacagcccagccagcccattctactcagggaaatcatctggaatcatctgggtctggttatttttcacaagcagccaaaatcctgggaaactggtttgtacaaaccactaaatttccctggcttataaaatggcaataatcacagtctggcttcatagagctgtcatgacaattaagtggcttctgcaaatcacgtacatggaaccaggatggaatccaggtctatgaggcgcacacgagaaaagattttgaaatgagctccaaaggtcttgagatgcatgaaaccctcattatctgcacctttatttacaaatcaatgcttaacggagctaaaggcaaatcttcattttaagattaagaaagattaagattaattaagaaaacatagacatataatgaaaagatacatacatatatttaaaaaaacaaaaacaaaaactgataatgcagtgactaagagcaaataatgcaatgactaagagcaaataacatcaaatcattcacttctcatcaaccagcaaatgtgaatgccttcaaagcttcctgccaacttcctctagacaaccacacccaaatggcaaatgcagacacaacagcttctttgcttgactactctctcctacttcatttccgttctccccaccccctaccccgccccccccccccccgccgcctccaccccggcccccgccgccaaaaccctgtgcatcctgaacctgggagcgtcctttaaagaagccatacaagggagctccctgaggtcctcccctaaacggcctctgactctcctacctggaagcagagcccaagaactttgagctgatgagaggactctgggcttggccgtgtatgggaaagcagcctgttgcatgtcaagagtgacgccatcttgaagcaaaaccgccgtgattggttttgcagaccaacctgttgcagaccaacctggaatagctgacagctgagttccagacatatgagaaggtacagatgacccagaagaaccatccagccaagcctagctaaatgccctacccacaaactcagaagctaaaaaaacatgctactgagctttggggtggtttgttacacagcattattgtaactaaccaatacaagaaacctgcagctgctcagccaaatcctgaagctagcctgcttggatttgaaacccatctccattacctgtcagctgagtgacttaacttccctgagccttagatctctcatctataaaatgggataagagcaggtctaacccaacaagatggttccatcattcaggaaacaacagtttatggggttcctcttgctctgtgtgagaaagagacaacaatgaccaagacagactaggcatgatggctcacgcctgtaaccccagcactttgggaggccaaggtgggaggattgattgagcccaggaattgaaagccagcctgggtaacatagcaagaccccatctctaaaaaaaaaaaaaaaaaaaaaaattaagaacctgggaggccgaggttgcggtgagccgagatcgcgccaatgcactccagcctggaggcgagagcgaaactccatctcaaaaagaagaaaaaaaaaattaaaaattagccaggggtggtagctcatgcccatagttccagcactttgggaggtcaaggtgagaggatcacctaagcccaggagattgaggctgaagtgagctatgatcacaccactacattccagcctgggcaacagagcaataccctgtctgtaaaaaaccaaaacagtgaccaagagaaagttccatatgcataaaaagcaaacagatctacgatatgaagtcaggtagagagaagtaagtgctctgaagagaagcacaactgactaaaggacggaggctgtgatggggagaggagatactgctttcgataaggtagtcagggacgcccaccaaaaggagatgacatcccagccacgtgtgaatgaagagaccatgagggaggttttcccagcagagggaatggtggtgccaaggtgtagaagcgggcatgagattggtgtgtgtgagcaatggaaagaaggctggcaagaagaggcaagtggcagaatggcaggaggcggcatctaagaggcaggcacagatcagagtatggggataatggatttaggaagttttttgtttgtttatgtttttgtttagagacagagtcttgctctgtcacccaggttggagtgcagtggcgcgatcttggctcactgcaacctccatctcctgggttcaagtgattctcctgcctcagcctccagagtagctgggattacaggcatgcaccaccatgcccggctaattttttgtatttttagtagagacagggttttgccatattgcccaggctggtctcgaactcctgaacgcaagtactccacccacctcagcctcccaaagtgctgagattacaggcgtgagccaccgtgtccagccatttttttttttaaggcagggtcttgctctatcgcccaggctggagtatagtggcacaatcatggctcactgcagcctcaacctcctgggctcaagctattctcctgtcttagcctcccacgtagctgagactacaggcacaggccactcctagcttggagtgtggattttattgtgattaaattagttgtcaacctagataacaaacagcgagaggctct[132 bp omitted]tctactaaaaatacaaaaattagccaggcatcatggcaggtgcatgtaatcccagctgctagggaggccaaggcaggagaatcagttgaacccggggggtggaggttgcagtgagccaagttcatgccactgcactccagcatgggcgaaagagtgaaactacatctcaaaaaaaaaaaaaaagtttattcaagaacagagaattgcaatgggaataggagtgttatacatattcaaggaggtcaaagaagacaaaggtttttaaagaaaaaaaatgaggagaattacataatggttttgaaataatcatctttggctagaaaaatgaatcacaaagatgatgccagtctggggttggacaggcagttgctgggcaaacgtccttgcagaagtatttttctgtgtaagtttgcaatggtctttgtgtgagattgtgttttttgcagtttttttgtgatagtttttgtgatcagtcatacaagtatgagaaccctctctccatggctttccttcactctgttggtcggagcttttttttctttttcttttttttaacatgagtgactccattttgattctgataaccttcaaaagttcatatgtgcctgggtcatggggactgcttagtaaatgctagctttcactttactattggaatttttacctccaaaatgcagcatctccccattccaaggtcctaagtagaatggaagaggagatgccagggaatcttgacaagggaaactttcacggttgactctacatttgaatttctatagcaggattaagtctgtgtattatttacgtgatttaaaaaggccgagtgtggtggctcacgcctgtaattccaggactttgggaggctgaggcaggtggatcacctgaggtcaggaatttgagaccagcctggtcaacatataatgaaaccccatctctactacgaatataaaaattagccaggcatggtggcatacacctgtaatcccagctactcaggaggctgaggcaagagaattgtttgaacctggg[139 bp omitted]ggaaaactaaggcagaaggatcgcctaagcctaggaggtcaaggctgccatgagctgcgatcacaccactgcaccccaggctgggtgacagagcaagaccccctctcacaaaaaaatttttaaaaagataatgttaaatatatgttagtagataaatgttcacaaaaatcattagtgttgaaggaagtgaggaaaagattaaagggtgtattagtccattctcacactgctataaagatactacctgctataaagatactggccagacaaggtggctcatgcctgtaatccctactctttgggaggctgaggtgggtagatcacccgatgtcaggagttcaagaccagcctggctaacatgatgaaaacccgtctctactaaaaatacaaaaaaaaaaaaaaagtcaggcatggtggcaggcacctgtaatcagctactcaggaggctgaggcaggagaatcacttgaatccaggagacagaggttgtgagccgagatcgcactactgcactccagcctgggcaacaagagggaaactctgtctcaaaaaaaaagatactacctgagactgggtaatttataaacaaaagaggtttaattgacctgcagttccacattgctgaggaagcctcaggaaacttacactcatggcggaaggggaaggggaagcaagcaccttcttcacaaggtggcaggagagacagtgcaggggaaacggccacttataaaccatcagatctcatgagaactgcatgggggaaccacccccaagatcgaatcacctcccaccaggtccctccctccacatgtggggattacaatttgagatgaggttttggggggacacagagccaaaccatatcaccagggttaagatttataaattgctctgtgaaccccgaaaatctgagacaggtctcagttaattcagaaagttaattaggagaccaaggttgagaatgcacgcacatgacacagcctcaggaggtcctgatgacacgtgcccaaggtggtaggggcacagcttggttttataccttttaggaagacatgagacatcaatcagtaggtgtaagatgtacattggttcagtccagaaaggtgggacaactcaaggtgaaggcaggaaactggaagaaaggagggggcttccagatcataggtagataagagagaagtggttgcattcatttttttgaaatggagtctcactctgtaacccaggctggagtacagtggtgctatctcggctcactgcaacctccacctcctgggttcaagtgattctcctgcctcagtctcccaagtagctgggattccaggtgcccacgaccacacccagctaatttttgtatgttttagtagagcaagggtttcgccatgtcggccaggctggtcttgaactcctgacctcaggtgatccgccagtctcggcctcccaaagtgctgggataacaggcatgagccactgcgcccagccagttgcattctttttgttttttgttttttgttttttttttttttgagacagagtcttgctctgttgccctaggctggagcgtagtggcgcaaccttgtctcactgcagcctctgcctgctgggttcaagtgattcttctgcctcagcctccagagtaactgggattacaggcatgtgccaccatgcccggctaatttgttgttgttgttgctgttgctgctgctgttgttgttgttgagacggagtctcactctgtcatccaggctggagtgcaatcgtgagatcttggctcactgcaacctccgcctcccgggttcaagctattctcatgtctcagcctcccgagtaactgggattacaggcacccaccaccacgcctggctaatttttgcatttttagtagagacgggggtgtcgctatgttgaccaggctggtctcgaacccctgacctcaggtgaaccatccgcctcgaactcccaaagtgctaggatgacaagcataagccaccatgctggtagttgcattcttttcagtttctgattagcctctccaaatggggcaatgagatatgcatttatctcagtgagcagagcggtgactttgaatagaatgggaggcaggttcaccctaagctgttcccagcttgacttttccctttagctttggtgattttggggccccaatatttattttcctctcacagctcagaactgtgcttggtgccatgagtgtttgtcgcatagctgttggtaaatgcaggatgggcattgcaggcagaaggaacaggaagtgcaaaggttctgagaagggaatgggtctctgtggctaaggctcatccaggagacctgcgtggctgcagcggagcaggcagtggttagtgcaagaagttgcggccagcacagcggtcagggccagaccctgtgggcatgccaagggcacagtgcttccgctaaatgagaagagaagccactggagtgtttcaaaagttaaccattattggccaggcatggtgactcatgcctgtaatcccaatgctttggaaggccaaggtgggagaattgcttgagcccaggagttcaagaccaacctgggcaacaaagtgagaccccatctctacaagaaattagacaggtgtggtggcacacacctgtaatcccagctactctccaggctgaactgggaagatggcttgagcctgggaggtcaagactgcagtgagctatgatcacgccactgcactccaacctgggtgacagagtgaggccctctttcaagaaagaaaaaaactaataataatattgttcaatgaaatttaccagaggccactagtttggaccaagcttctgtgcaaagcccaacagaccaaaccaaaatggagtcactcgtgctaacttccacatcaccaagccaaaactcaattgttttacctgaccttccaaaaaatcaggagagtgaaagataacagccaagtccccaagcaggccagttttagcctgcatgataaggaaacccctgtcctttaacctttacaaggaaagtaattttgaaatggccaatacactttttcttctctgtttctgcagtctctgccctttctgtctataaaaccaacctcttttgctcgactcatcagaatactcattctgtctcttataattcgatgttgcccaattctaaaatcacaaataataaccagttaagatctttaagcaggctgggcacagtggctcatgcctgtaatcccagcactttgggaggccaaggcaggtggatcacttgaggtcagtagttcgagaccagcctggccaacatgtatcttttgtaaagacataaaaattagccaggcatgatggtgcatacttgtaatcccagctatttgggaggctgaggtgggagggaatctataagcaaatttgttgtgattttgtcttttgacagttcaaggactgaacactttctcttttttttttttttgagacagagtcttgctctgtcaccaggctggagtgcagtggggcaatcttggcttactgcaacctccacctcccgggttcaagcaattatcttgcctcagcctcccgaggggctgggattacaggcacctgccaccacgcctggctaatttttgtatttttattagaggtggggtttcaccatgttggccatgctggtctcgaaatcctgacctcatgatctgcctgcctcagcctcccaaagtgctgggattacagtcatgagccaacacgcctggccggactaagcactttcacctttattcttttctgtctccaaactcatccacaatctcacccagcttggactcacccctggcagttcatctccaccctgaccttgctttagcaatgatctttcatttcattcatcccttcttttggggcctttccatgactctagactctgagggtatacaatagtgagcaatgcagactcagatcctgcccagaacattccctaacacacagtaggtgttcattaaaagcttttagaatgaataagaatagttgtttttttaagaccctactaacaaaataaaaagttgacatccttaatgcttgaccctccaattttgtctttgaagcttgatggttcacaatctccaaactggtttacagcacaaagtcccaatgccaaggttctttcccaaatgggcctgacctaattccccagcctcatctccctgctctctcccaggttgctgcacccagttccggacacaaggcatgttcgctcaggcctctgcacgtgctccttgttatttaagatcccgctcctggtcttatccatcacgacctctgagaagatgtcctggaaacccagacagagctttgtccctgtgtctgctgcagatttaggtgaatgttggtgcaagtgcattcgccaaatagcagtagtactttccgagagtccagccaggggctggatgctgatgcttagctgacattgctgctccaagccgccagagggcgcatggaaaacaccaatctgacttgcagggtgaaaaccctacaggagctcccagtttctcgtataattaacagttaaggtgccactgttcttgttttgtttgtttgttttgaggcagggtcttgctctgtcacccaggctggagtgcggtggcgcaatctcggctctctgcagcctcgtcatcctgggctcaagtgaacctcccaccttttgacacagaaaagttggcttatcagtggttcattttgttaacccatgttcatgagtttcttgtgatgtgctaatttactgctgatatttaggatagtcctgttgatcctaataaattcctaattgttgttcttgtttcatcggttcaccgtgaaccagtggatgttgtctcactcttatccctgatgcacactggcacttttatatgaagtgcccttgatgacactagtgatgatggttgtcactagagtggtacttgcattctggattatcttactgcactttagcttgctaggtgagcactcaaactccctagtagctgagaccacaggtgcgtaccactcagctaatttttgtattttagcagagatggggtctcgctatattgcccaagctgggcagactcatgggctcaagtgatcctcccatctcagcctcgcatagtgctgggattacaggcatgagccaccgcgccccaccaagatgccactgttttttgtttgtttttctggggcttggggggcttttttgttttgtttttttgttgtggggggagttcgagacagagtatcactctgttgcccaggcaggagtgcagcggcatggtctcggctcactgcaacctccgcctcctgggttcaagcgattctcctgcctcagcctcttgagtagctgggattagtcaggcccgccaccaggcctgactaattttttttgtatttttagtagagatgggttttcaccat[140 bp omitted]aggtgggacttgggtatgggaccaaattgaggactagctaagcagtttcccataatacacgcccaccagtatgccacgtcagtttaccgttgccatggcaacacctgggagttactgcccctttccatgccaataaccccacaagccaaaagtcattaccccttccctagaaatttctgcataaaccgcgccttaatctacatgtaattaaaagtaagtatcgggctgagcacactggctcacgcctgtaatcccagcattttgggaggccaaagctggcggatcatctgagtgaagagtttgagactagcttggccgacattgtgaaaccccatctctactaacaatacaataattagccaggcgtggtgacgcccgcctgtaatcccagctactcaggaggctgaagtaggagaattacttgaacccaggaggcggaggttgcagtgagccgagatggcgccactgacagcactccagcctgggtgatagagagagactgttgtctaaaaaaaaaaaaaaaaaaaaaaaaaaaaaggagtctatttacaagggtggaggcagtgggtagaaagatacaggcagcccaaggcaaccgtacatcaagaagggagttggggaaataaatacccaccctccagtttcttgccagtgtctccccattgggcaaaccgatgcagaaagctagaggttcagaaagctcattgtggttcatgctgatcccaaggtatggtcagactcccaggagtatggcggggagaggtggagagtggacctgaagaggcaaacaaaaaatatccagcatagtccgggcacagcagctcacacctgtaattccagcactttgggaagctgaggtgtgaagatcacttgaggccaagagttcgagaccagcctggacaacataatgagactcatctctacaaaaaaaaaatttttttttaattagcctggcatggtggcatgcacctgtaattccagttatttccaaggctgaggagggaggatggcttgagcctaggagtttgaggctgcagtgagctatgattgtaccactgcactacagcctgggcaacagagtgagaccctgtctcaaaaaaaaaagggaagaaaagaaaaaagaaaaacatccagcatagtgttctatttgtattgttattgtatttcttattgtggcctatgaggcccttcaaggtttaggcctaacctctgcctcctcttcccaccccacccactacattcctctctgaaacccagggactgactgggaagggatgggagacaaccttctggagtgatggtgatgttctgattcaagataaggattttggcggcacgggcctgcacatttgtcagaattcctctaacaatgtgcttaagttttgtgcatttcagcatatgtaaattttacctgaagaggagaaactaaataaatatgcttttcaacttactttgaaatgcattgaaaaggcaagaaggagtgatggatagatggatggaaaggtgggtaaatacttgataaagcaagttgagtaagatgttaattaatttagaatctaggtgatggggccaggcacggtggctcatgcctgtaatcccagcactttgggaggccaaggcaggcagatggcttgagtacaggagttcgagaccagcctgggcaacagggcgaaatcctatctatctctacaaaaaaaaaattagccaggcgtggtggcacatgcccctagtcccaactactcaggaggctgaggtgggaggatcacctgagccacagaagtcgaggctgaagtgagccaagattgcaccactacactccaggctgggctatgggagtgagaccctgtgtccaaagataaaataaaaatagagctgggcacggtggctcacccctgtaatcccagcattttgggaggccaaggcggatgaatcacttgaggccaggagttcaagaccagcctgcccaacatggtgaaaccccatctctactaaaaatacaaaaattagccaggcgtggtggtgggcacctgtaatcccagctactcaggaggctgaggcaggagaatcgcttgaacctgggaggtgaaggttgcagtgagcccagatcacaccactgcactccagcctgggtgacaaagtgagactctgtctcaaaaataataataataatcatacaaatagaatctaggtgatgggtatatatgagtgttcactgtaagattattttaacttctctatgttttaaataattcattttaaacatctgtgcaaaagtaaaaataaaaatttgggaaagtgttgagtcagcaaaggaatttggattggattgattggttggaggaaccaagaagaaatgaattgctctgggactttccacagaaaccacaaccgcttccctgcagcatagagctggcctccaggaacaaactgtgccagctctcaagtctcagttctccagaaagcctgtcaggaaaaaagtgcagagaagagaaagagacagcacccttgcttctcagaaatcctgtgatgaacagatctgcctaacatctgaagtcatgcactattcattcgacaaactataattgaaaccctcctctgtgcccagccctgagatgtgtgtgtggcactgacaacatagccccagcccttccctcaggagactcaaagtccaggggcagagacagacacatcttccagtgttatggtttggctccatgtccccacccaaatctcatctcaaattgtaatccccatgtgtgagggaatgacctggtgggaggtgattggatcatggggacggtttctcacatgctgtttttgtgctgatgag[224 bp omitted]gaggc[169 bp omitted]tttctctgctgccgccatgtaagacatgccttacttcccattgaccttctgccataattgtaagtttcctgagtcctcctcagccatgcagaattgtgagtcaattaaacctcttttcagtccaggcgcagtggctcaaacctgtactcccagcactttgggaggccaaagcaggcagatcatctgaggtcaggagttcaagaccatcctggccaacatggtgaaaccccatctctcctgaaaatgcaaaaattagccaggtatggtggcggacacctgtaacctcagctacttgggaggctgaggcaggagaattgcttgaacccgggaggtggaggttacactgagccaacttctctctactgcactctagcctggacaacagagtaagaccttatattaaaaaaaataataataaataaaggccaggcatgatggctcatgtctgtaatcccagcattttgggaggccgagccaggcagatcatgaggtcaggagttcaagatcagcctgaccaacatggtgaaaccctgtctctactaaaaaatacagaaattagctgggcatggtggcacacgcctgtaatcccagctactcaggaggctgaggcaggagaatcacttgaatccgggaggcggaggtttcaatgagccgagattgtgccactgcactccagcctgggcaacagagcaagactgtgtctcaaaaaaaataataaattaaaaaaataaaaacctcttttctttatcaattacccagcctcaggtagaatctttatagcaatgtgagaccagaccaatacatccagatagcaacaatcccaagtgatcaaaacaataatgggggaagccccaaatgaggcatgtgacccagactggtggtcaggaaagatacctgatggagaggacatccaagctaagtcttaaagaaagagtaggtgtcaccaggtagagacggaaggacaatggaaaagcattccaggcagaaggaacagcaactgcaaaggtctgggagtgagcagaagagtttgatgctcaaacttttctgaactgaacttttctgaactgaaaagttcagtgtcattggaatgtgaaaggaagcagagggtagggaggggttaaaggcaagcatgcagcagtcaccagttcctgtgtgggcttgtaagccatggtagggcattggaatcttaccctgcgagtgctggggagtcacaacagggttatagtcagtaggaggacttcaccagtttgtaaatgattccaattgcaaaacaagggaaggagatgagggaatgtatcggtcaggattggctaagttatgctgcagtgacaaacagctccagaattcagtgactcaaaacaacaaaggttggctgggtgcagtggcttacgtctggaatcccagaactttcagaggccaaggagggagaagtgcttgaggccaggagttcaagaccagcctgagcaacatagtgagattccatctcttcaaaaaaaacttttaaaaattacctgggcacggtgtgcacacctgtagtcccatctactcagaagcctgagacaggaggatctcttgagcccaggagttcaaggttaccatgagccgtgatcgcaccactgcactccagcctgggtgacaaagcaagaacccatctcaaaagaaaaataaataaattttaaaaataaattttctggccaggcacggtggtgcatgattgtaatcccagcactttgaaaggccgaggtgggagaatcttttgagctcggaagctcgagaccagcctgggtaacatggcaaaaccccatctctacaaaaaaaaatacaaaaattagccaggtatggtggaacatgcctgtagtcccagctactcaggaggctggggtgggaggattgcttgagcccaggaggtggaggctgcagtgagctgtgatcgtaccagtgtactccagcctgggtgacagaacgagaacatgtctcaaaaaaaaattttttttctagcaaccacattttttaatttagttatttttgagacggagtctcgctcttgtcacccaggctggagtgcaatggtgcaatcttgactcattgcaatctctgcctcccaggttcaagcaattctcctgcctcagccttccaagtagctgggattacaggtgcacaccaccgcgcctggctaatttttgtattttagtagagaccgggtttcaccatgttgggcaggctggtctcgaactcctgacctcaagtgatccaactgcctcagcctcccaaagtgctgggattacaggtgtgagccaccacacccagccattgccattttatagatgagaaaactgaggcacagaaagatgatggggcttgtccaaagtcacgagctagagcaggagcagggatttgaaccccagccatcgggctccttgcaaggagagcagagatgggttcctacatggtcattccttgggctgggtgagtgtgagcccttggtggtccaatcctactccccccagaggtctcagtaaagagagaatgctagtgattcttgagaatactgaagggaaaacccacagttggtcccaagaacgacggtgtgggtggaagtgaagagatgtgggaaaagattttcctctttcttgccccagattgccagggagttggaaaaatccccttgcactatgggctatagactagtggctgtcactgctactggattcttcatcactggaaaagcagaaagttggggtgagttccctgtgaagtcccagaccaggagaatggatgtaggaggagggcctctctttgttcttgttttttgtttgtttggtttggtttggtttttgtggggttttttgttttgttttgtttctgagacaaggtcttgctctgtcacccaggctggagtgcaatgtcatgatcagagctcactgcagcctcaacctcccggggatcaagcgatcctcccaccccagcctcctgagtagctgggattacaggcgcgtgccaccacacgcctggctaacttttgtactttttttagagacgaggtttcaccatgttgtccagactggtctagaactcctgggctcaagctatcctcccacctcggcctcccaaagtgctagaattacaggtgtgagccaccgtgcccggccaggagagcctctcttcaacaagcatctccagtgtgccaggctctggaaggagaactctagtctctcattttatgaccctccctttccaaatggggaaactgaggctcagaggagacatgtgactcatccaacatcacacagaggggaaggatggaaaagtttcctcccacccccatcccatggccacccaattccctttccagaggcaatggtatttattgccttgtgggtatttcttgacatgttctaggcatatacaagcatttacacacagatttttttttttacacaatagtggtacactgttctgtatcttatctttcattttacttaacattattttcaagatctttccacattaatacaaatagatgtgcctggttttatttattttatttaattaatttatttttgagacagagtctcactctgtcacctaggctagagtgcagtggcgtgatcttggctcactgcaacctccacctcctgggttcaagcaattctcctgccttgcctcccaagtagctgggattacaggcacccaccaccacgcccagctactttttgtatttttagtaga[141 bp omitted]catcaaactgtgtgagcacaccatcataagcataaccagttccctcctgataaacatttaggttattcctaatgttttgttattccaaacactactgcaattaacatcctggagcagacctgacatcagcctcaggcgtccatgtctacatgtgagataaattcctgagagaaaaacctgccaagtcagaagcgatctgcatttgtcatttagaaagacgtttccaaattgcaccccaatttccctcccctgcaactgattgaccaaccatttctcaaaagggctttttgagcactctctctctctctctctcttgctgtctctgtatttttttaatgtttgacagcaagaagatagtcatgtcttgcttatgtaattaaaattaaacaagcccttcgttaaaaacacacaaacccaggaagaagagaaaccagcaaggccagttcaggcagatccaccctgccccttgtcacacctgccttgtccccagcaagccctgaaaaagaggctgaaatcaatttctcacacatggacctcagacatcaaaccttggaaaaaatacaggaaagagattttgtaactttccccctctgtggcttttcgtacggctaaaccctctcactctctcttccctttctttctcctcgtcctttttcttctttctctcacttctgttttggtgagctgtcattaaaaacactttaaagccgtgtccagtctaataagttatacagaatctggctgtgtgtgtgtgtgtgtgtgtgtgtgtgtgtgtgtgtgtctgtgtgtgagagagagagaaagagagagagacagagtctcactctgtcgcccaggctggagtgcagtggtacaatcacagctcactgcagcctccgccttccgggttcaagtgattctcctgcctc[131 bp omitted]gctccgcctcccaggttcaaacgattcttctgcctcagcctcctgagtagctgggactacaggagtccgccaccacgtccagctaatttttgtatttttagtagagacagggttttaccatat[136 bp omitted]ttggccagactggtctcgaactcctcacctaaggtgatccgcccgcctcgacttcccaaagtgctgtgattacaggcgtgagccaccatgcccagccgattttgttgcatttttagtagagatggggtttcgccatattggccagactggtctcaaactcctgacttcaagagatccacccgcctcggcctcacaaaatgttgcgattatgggtatgagccaccacacctggccagaatctggtatttttaacagaaagcagagctaggagcttaaaagtagaaactagatgagcaaaacaattgattatatttgaaacacattaagctcttcttttctcttctcctcctgaacacaagcaagtaactgtctggaaggaggttggaggggttgcggtgggggagcgggagtctcagggcccataatgggtttcagaggccaagatggataaggaggtcatcctcccaagaagatgggaaggctggacagtgacagctgcaaaagattggttactttcagggggatggatccgctaagtaaatatattgccagcctggccaacatagcgaattcccatctctactaaaaatacaaaaattagccgggcgtggtggtgtgcacctgtagtcccagctactcgagaggctgaggcaggagaattgcttgaacctgggaggcagaagttgcagtgagccaagatcacgccactgcactccagcctgggcaacagagtgagactccatctcaaacaacaacaaaaaaaagcattggaagccagatttcttttttttgagacagtgtcttgctttgtcacccaggctggagtgcagtggcaccatcatggttcactgcaacctcggcctccagggttcaagcgatcctcccacctcagcatccccaagtagctgggactacaggcacgtgccaccacacctggctaatttttaatgtatttttcttagagacgaggttgcccaggatggtcttaaattcctggactcaagggatccgcctgcctcagcctcccaaaatgctgggattacaagcatgagccaccacgcccagctgagtggtagggattttgagctggggtgaatggcgattgtaggtcatttgcatttttaatcggctttacccagaagagaaggcaactttcttctgtcttcatgacaggaggtattttacaactgagagctgagtcatgtaccaaagttaggctctcaccttcctggggggagataggagtgctatttccttttatgtttacaatttcaaaaagatagtttcctgggtcctggtcactcatccctgtaatcccagcattttgagaagccaaggcaggaagatagcttgaccccagttcaagatcagcctgggcaacatagtgagactccatttcctgggctatcaactggcaagatactttttttttctttttttttttgtgacagagtgtcattttgtcgcccccaggctgaagtgcaatggcgtgatcttggctcgctgcaacctccgcctcccaggttgaagcgattctcatgcctcagcctcctgagtagctgggattacaggcacttgccaccacacctggctaatttctgtatttttagtagagacggggtttcaacatgttggtcaggctggtcttgaactcctgacctcgtgatccacccgccttggcctcccaaagtactgggattacgggcgtgagccaccgcgcccggccaagacttttaaagaggtttatatccatctcaaatggacaaagaaataatttacaatgacaagttttctcaagtaaatgctctaagaaaagggaggtaaggggcctctgtggttagaccctctggattctgagggcctagaggcaggaggaagcctgtctaaagtttagtcaagctgagggaaacattatggcagtgttggtacactctgtaaagctgacctgcccgtgttcaaatccgagctccactgcttaatagctgagtgacgtggggcaagtttcttaacctctctagccctgatttccccatcttgtaaaatgcaggtgattaacacttacttcataggatggttttgtagattaaatatattaatccaagtacagcacttaatacagtacctggcacataatcaatgtattatttgctgtgggtaattacttcatcattctgagcctcagtttccccaatcatcccatctgaaaatatgtggaaaagtcaatgagatgatggctgtaaactgatagcatagacttggcatctagtaagactgtctttaatcactaacacagctgggcacggtgcctcacatctgtaatcccagcacttgagagacagaggcaggaggatcatctgagcccaggagttcgagaccagcctgggtaacatagtgagacgccaatctctacaa[133 bp omitted]atggagaaaccccatctctactaaaaatataaaattagccaagcatggtggcacatgcctgtaatcccagctactcgggaggctgaggcaggagaatcgcttgaacctgggaggggaggttgtggcgagctgagattgtgccattgcactccagcctgggtaacaagagcaaaactccatttcaaaaaaaaaaaaaaagaaaaatcattaatactcccaacactacatttaccatcactgatgtttccctctatacatgtattgcaatatatgtgtttcagaataagagctcatactcttattgatgttctattttgttgctattctccttatttgctattgttttgttgttacctcacactactccccattatcaatagtaatattggctatcaatagcaatattggcaatatactgttatgatctcactattccccacatctgatcctcctcccatcaagcagtcgcaaagcctaccaggaactctctcattcccaaaccaggcttttcccctccagtgcctctagggccaggccttcatctgattggaaggagatggaggtggggctcaagccccaggtccccaacatcaagcaaagaccaacagcagcacccccgggtcctacagacaagtgggacacagtaggtaagcccagttaatgacttttttttttgagacggagtttcactctttgcccacgctggagtgcagtggcgtgatctcggctcaccgcaacctccacctcttgggttcaagcgattctcccgcctcagcctcccgagtagctgggattacaggcatgtgccaccatgcccagctaattttgtatttttagtagagacagggtttctccatgttggtcaggctggtctcggactccagacctcaggtgatccagctgcctctgcctcccaaagtgctggcattacaggcatgagccactgcacccaggcttaatgactcttagtaaaccagatgaagccgggtgcagtggctcctgcctgtaatcccaacactttgggagtccaaggcaggaggactgggcatcatagcaagacctcatctctacaaaaaataaaattagccaagtatgatgggataagcctgtagtcccagctacttgggagcctgaggcaggagttagaggttgcagtgagctatgattgggccactgcagtccagtttgggtgaacagagaccccgtctctaaaacaatgcagacggctggctggatgacaaggcgggtggagcctagggagggtacataaactcattagacaaagctctctattccctggcattgctaaaagccccattcgcccctccatgctgcttaatggtttcgcccggtctccccctcaccagtgggaccacccacatgcaggatagacccaggagattaaagttcaaccgtgacttcccccaggactgcggctctaggtcccatatctctcccgttaaaggctttatgatgcccaccctagctcagctagagcggttattgcgagaaacaaggtggaagtgactcctttaaagcactatacaaagtaattaaatctttattgaggcatttatgtgccagaaactgatcacacacagacataaggcacggtccctgccctcgaggagctcacagtctagtaaggaagacatatggggaaccgattccccaaagatgcggggagtaggggaggcagtgcttagagtggggagccattgtcccacccaccccacgctccaaagtccaggctggctaggagaaagtgagtaggaagcttagcatcctctctctcaccttccccgtgacagctgacttctctcactctgtcctaacatcacaagaggacaagcggagagacaaggatgagaaggatacaggagctgtcctcaaaaagctagaacacccctggcagaatatatacaacggtattttatttcccaaagccgcaaaccagcgcagcagaagctggggatactggggaatgttggaaaaacaggggctgggccagcccagtccagtggtgggaacaggaagtgatgagaagaggggtacccagggccagagaagtaggtgagagggaaatttccaggtggagaagctcacagtaggacaccagcagccacggccaacagaagggctgccaatccagctgtgggagccacacagcctttattatggggctgctggggccccccttttgcaggatactgccctgaattgctgcggtcctggtggccagcggcgcctccagtcaacctgggctcctcatcccgggaggcctcgtgttctactccctgtctcggagtctgactggttggcgctggcatgggtttggtggtggatgtgggtctcactggggccgaggtagaagtggtgacagatgtggttgaggccacagtcgtgggctctggagggggcagccggacaaggggtgggattcgaggggagaagtaggtcttgttgcggaggtcagagttacagcgggacccctggcaacaggagccactgagcgtgaaccctgggcctgttactccatcccgagtgcagaattcatcctggacacagccccggacaggcaaggacacagtcacattagctgcaggaaggagacacagataggtcagtggctggagggagagaggttgacatggcc[134 bp omitted]aaaaaaaaaagaacagagaacccccaaaatgagacagaaagtctctgcatccattaatcccaaaatctcaactcaggtcctactatgagaaacagacagactcactgtctttggcacatggtggattaacattttccattgtgctttgaatggaaatgtgtgtaggctgaaccaaaagtagggtttaaaacaaaggcttagactgagatacaagacctctcacaagaccacagtgcagaacaaacttcctctacaaccctctcaccattatccccttagccttcaccctggcttttacctccccatcagaatttactcttagagtcagagttacatctccacaccaggctcagtggttcacggctgtaatcccagcactctgggagacctaggcagggggatctcttagcccaagagttcaataccagcctgggtaacatggcaagaccccactgttaccaaaaataaaaggaaccagtcgtggcggtgcaccctgtagtcccagctacttgggaggctgaggcgggaggactgcttgagcccaagaggtagaggctgcagtgagctatgattgcgccactacactccaggctaggcgatagagcaagatgctgtctttaaaaaaaaatagtaataataaaataaaaaagaactacatcttccatagcataactggcaggggatgggatttgaagaacttcattttccatggttacatttctcaatagtctgggacaggcgggggaccccttgagttttaagggctaagaactagagattccccgcagtgcctgggcagaagcttagaggcttaaatacctcttaagtacctggcagccctctatggaaatgcatttccctccaaaacactctgggacaaagcatcactatccccacactattaatatgttgggggaagggactgcattttccatgatgccctacgatacaagcacctaggccccacgattcccagaatgcgtcgcaggttaaggaaacgctttgggtaaagggctccctaccgcccagggtgcttcagaagggctaccacaactcccgtaggtcccgtgctccggggctccctcacctgccgtcaaggtgacgttgccgtcgaagcagcccttgtagacatgatcgctggcgttgtagcagctcacgaccggcggcgatgtaccctggcacgcctcccggctcaggcccacacagctgtagcactccacgccgttgggcgggtatgcactctcattacctgcgaggggagccgagaggaagaaaaggtgtcgaaagggttcgggaaccgcagctcgtcctctagccccgcccctaaggcctggccccggcactatcgatgaccccgcctactagtagccccgccccagcgcgcaacctcgcggcgcctacagccagaaagtccctcctgctgcctcttggccccgccccagagtgtgaccccacccccagcccaggtcgagtactcccgcctctgccacggctccacctctatcttggcaggcccgaatgtggctccgcccccgcagctacggcccggcccccacggacctgccgggtcgagcgcccgcgaggtgaggttgagcttggcgttgcagcgatcctgagcgcattgctgcagctggatgaacgccagaagcccgtgaagatccaggccgcggtcattcttgccggggagtcccgaaccgcaaccccgcactgccagcgagaattgtccgtggactagggagagggacaagggcgggattagctgtgggcgtggtctcagatggggcgtggcccagagttgggtagggtctgggaggggcggggcctcaaataggccaacaccacaggaccgacaggcaggaattggcggatggacgcccccaaagagccgctcagagcggaaagaacgaccgaagcagggaggagcggggtcacggaacgggggcggaacctcaaagagctgagtcggaggagacagcctggttgacaggcagggatggggaggtctcattggtggagcagaaaaagtgcataggacgtgacctcgttccaaacccgagctctccccgtccgccccacccagttctcaactctctgctcctcgcgcttgtaattgttaatagagaaggcctggcctgcaaggctgtgtcgtagggtcccggccaggctgaaagggaggggtggggccgcgttaaaggggcgtggccagatccagaaaggactataaggaggcggggctgggccggaggagcctgcagtggtgtgcgtggcccgggggtccccactcactggtctccaccgcccccacggcctcggtgcagacgtccacgcccggcgcgcacttcactgtcttcatcttgttcggggagcatccgtcatctgctttctgcacgcagctgtagcactccagggcctgcgctcctgggggagcggagccgaatagacctgagccctccttgctaaagcgtccacccccaaggagaaatagtccttcccatgccctctgtcccgggattagacagtcttattgcacacacttttccagggcaggagtagggaaaagctttccacaaatctggaagcacgggaatcactggacccttttccttcacacccactatgccaactgtgggcacatccttccgacagccctgtatgcccactgtaggcgatccccgccatgaagcccctcatcccggggtaggaaggatacctcctcacggttttctgctcagaatgagagaacttttcccacagtgtgtgggagaacttttcccacagtagactgtgctcagtgagggatcccttcccacagcccccttctgctcaaatgagagaacactacccacagcttctctgcccaggacagggaacacttttttctttttttctttttttcttttttttttttttgagacggagtctcgctctgtcgccaggctggagtgcagtggcgcaatctcggctcactgcaacctcccctcctggattcaaacgattctcctgcctcagcctcccgagtagctgggactacaggctcgcgctaccgcgcccagctaatttttgtatttttagtagagacagggtttcaccatgttggccaggctggtctcgatcgtttgacctcatgatccgcctgcctcggcctcccaaagtgctgagattacaggcatgaaccaccgcgcccggcctaggaacaggggacttctttctgcagcttcaggataggaaaattttgcccacagctccccttgtccgtggtggggaacccttcctacggcccatggtggaggacccttccctctgcctcccttgcttaggatgggggaactttgcccacagtgccctctgcttatgtggggatccttcccacagccttctctgtacggggccagaggagcctcctccctaagagcccccactctaccccctccacctctccgggcagcagacccacctccgcgaagcagcagcagcagcagccagcctgcagtccagatcatggcctgggcacctgctttcctggcggggtccatggctccgtcctgctcccttggcgtcccccctggatgtgccgcctccgagctcgggccctcttacctgagcccaggatgagtaacctcgccccaggcaaccccagccttgcccaaccgggccaactcagcgtcggctgtggggcggggccccgcccctaggcgcgtcatccaagggagagcggtccctgccctgtgaagttgccaaggagggaaagggtgggagctgaggttccctgacagctcgcgggagaaagtctgtgtgtgtttggagtgggagagtagtggggcttaaagacaggctggggctactcgacattcagtgttcggtaactgttaaatgagcatctacagtgtgcccggctttggtctaggtaatgctggagatgaagacagaaccagtgcctgtcctggcagagctcacagtctgatgggggagacagatgctaatcaaataatcgtacaaattggtgtttaccaaagagactaagacactgaaggaaaaagtgtagtgatacaaggagatgtgcagtctagaagtgggggctggtcggtgagggcttccttgaggttatctgagatgcaacctcaagggcatgcaggatgtagccagctagagcaggtcaagagagggacacagccctttacaagcagagggaacagcacgtgggagcacctggaggtaggaggtaggatggaccattcaaacatggaaaggagagcagtgctcctgagctcagaagtccatgagagaagggcaggaactgagatgaaagagtcaggcagaggccgagacactcagggcatcagaggccccgacaagagatttggattaattttgagaatagtagagaacctttaagagggtctaaatgagctggaggacataatagatttgcttcctaatatgatcaacctgagaaatagtgcagctagccatcaagaagtaaatggaggccgggcgcggtggctcatgcctgtaatcccagcaatttgggaggccgagctgggtggatcacttgagatcaggagtttgagaccagcctgggcaacatggcgaaacctcatctctattaaaaaaaaataataaatttaaaaaaattagccaggtgcagtggcgtgcacctgctgtcccagctactcggaagggtagggcaggagaatcacttgagcccaggaggtggaggttgcagtgagctgagatcacgccactgcactccagcctgggcaacagagtgagaccctgtctcaaaaaaaaaaatttaaaaatttaaaaattaaaaaaaagtaaatggatctgagagtaggatatatgattttaaaaaaggaaaaagaaaaagaagtgaatggcaaaagagagtggttggttcggccaatggaatactacacagcaatagaaaagatccaacacctgatatatgcagcaacatatctcaaaaactttgtgttggggccaggcacagtggctcacacctgtaatcccagcactttgagacaccaaggtgggaggatcacttgaacccaggggttttgagaccaggctgtgcaacatagtgagatcccatctcattttattttaaaaaaagaaaaaacttggtgttgagtttagaaagccttaaacaaacaaacaaaacatactgtgtaactgaatatatatgaagtttcagaacagacaaaactaaccagtggtgatagaaatcagaacacatgttacctttgggagggcatggccccagaaggagcaacagggaggagcccccacgatcttcatctaggtgacagctgcatgtgtgtacagatacgttgagaatcactgactcaggcctgtcactggacgtatgttattcttcaataaaaacaaggtaaagaatgtcactgtggactctgtgtaaaaaaggaaaatgactctagaaggggtgagagagaaggccaggaaaccaacagggggccgtgtagttttccatggaagaaagagaaaaacagcccctaacagctgggagttggcctgacacacatagtgaggccatggagttcaactgcgcctagataatttcacagagcaccaacctggacaaggccacactgcgacagtaaaggatcaagaaacaaatcaatagcctgggcaacacagcgaaacctcgtctctactgaaaatacaaaaaattagctgggcgtgggggtgtgcacctataatcccagctacttgagaggctgagctgggagaatcacccgagcctgggaggttgaggctgcagtgagctgagattgcgacactgcactccagcttgggcaaccagagtgagaccctgtctcaaaaaaacaaaaaacaaagaaaaacaaaatcaagaccaatccatagccatgtctgaacacagaaacaaacaaggtcattgtgcaaaccgcagaatgactaagcatccccatatcctggctaatataaatgactgcttatattatattaaagttacaactttaacctcactttatttctcctgcctcataaatgagatttatgcaaatgcccaaccacagcattactcctcctctgtttaacagtatccaaactagaacgaggtcccacttccttgcaccattcccaagaccaccacacacaagcccaaatcttaaaatcaatcctttctggccaggtgctcacacctgtaatcccagcactttgggaggccaagggggtggatcacctgagctcaagagttcgagaccagactggccaatgtggtgaaactccgtctctactaaaaatacaaaaaattagctgggtgtggtggcacacacctgtaatcccagttcctggggagtaggggctgaggcaggagaatcgctgaacctaggaggcagaggttgcagtgagccgagatttgcgccactgccctccaacctgggtgacagagcaagactttgactcaaaaaaaaaaaaaatcaatcctttctaacacccttttacttagacacctcacagttacctcatggtgtgttttctccctcattgcaagaagcaataaacccaacttgttcaaccacaggtgtgtccctggtggagaacattgacacaggccagagcagatgtacttagccaagggtgtcccaaaggaaaggtgaagagtggaaagatctaaaatattttaggaggaagaacaggtagggattactgatggatccaatgtgagggaagaggaagtgggaggtttccaagctaattccagacagttcttgccataaaccacatcatgacattaataacaatggtaacaaaagtcataataacaacagtgactgagtatcaagtgtttgtttcccagaaactgttttgaacagggggcatgcattatctcatttaatcctcacctgtaagtatggttattagcatttattaaccacttactctgtgcttagcactttctgtgaatcctctctgaatgtcacgacagctctgcaaagagagaactaagtctcatttcacagatgggaaaactgagactgggagaggcttggaagtggcagaactgggatttgaatccagggctgtctccaaaggcccccatgccatttgccaaagtcagagcctggctttaggcctgagattatattttgcaatgacccttagttttacagccagacaggcatgcatttgaataccaactctgcccctaatctgctgtgtgacttgatcaagtgactccaattctttgatgttcagaggcttcctgtctaaacaaagactatgacaaaagcacatgcattcagtgcttcctctgtgccaggcaactttccacaccctttacacacaatcctatgagagatttctatgatggtcaatttacaaatggggaaatcgaggcaggcatggggggcttaacaacttgctcagggtcacaaagctaggaagtcacaatgctaggagacagtatttgaactcaggcagtctggcttaactaacagtacctataattaggtacatgggtccattggatatcagctgtgaaactttgacaattacttggcccctgtgtgcctcagtgccctcatcctcatccataaaatgagggtcttagtagtacccacatcatactaggtgctatactgctagggcatcaatgttatatatatgtgaaatactatactgctagggcatcaatgttaaatatatgtgaaatgattaaaatagggtcaaattctaggagttatgaaagcattagtttttattactaataataggttaagggccaagcacagtggctggtgcctgtaatcccagcattttgtgggggctgaggcgggcagatcacttgagcccaggagtttgagaccagcctgggcaacatagtgaaaccctatctctacaaaaaatacaaaaagtagccaggtgtggtggtgcacacctgtagatccaactactcgggaggccgaggtggaaggatcgcattgagcctgggaggtcaaggctgcagtaagttgtgatcacgtcactgtactccagcctgagtcacagagtgagaccctgtctcaataataataataataaatagattgttagtataactattattattaacagccctcacttcttgagctccaaccgtgtgccacacagggtggtcagctcttatacaagcaatcttgccttgaattcctaacgagggggtagagaggaagatctccttcacagaggaagactctgagacccagagagaggaaggtatctgttcaagttcacacagcaagggaagcggcagagtcagatgtcagacccggctgcagggggctggctcactgtctgatgacgagacaagcagcggtcgtgtttataaagatattatctgttctccagaccctgtgaggcacccccgttcccaacaatgacgagcacttcagtcacctgggtgaggtcacttggcatcatgctgaagctgagagagagaaagtgaatgacttcttgtgaagtcattcattcagcactgtccccttccccctccctccgcccgcctcccagccttggaatctcagccctgattcttgctttgctgtgtgatgctgcataaatgctttcatctctctgagcctccaaggtgtctttttttttttttttttttttgagacggagtttcactcgtttcccaggctggagtgcaaatggcgcaatctcagctcactgcaacctctgtctcccaggttcaagcgattcttctacctcagcctcccgagtagctgggattacaggcatccaccaccacactcagcaaattttttgtatttttagtagagatggagtttcgccatgttggtc[131 bp omitted]ttggtagggtaaggcagtgggcaaaatatcaagtctggaagtggacagacacattttaatcctatctctgccaccctcttgctgtgtaacctcaagcaactccatctccctctctgaacttcccctgaaaacccctacctcctgaaggatagagcggggacccagtgagtgacaggcagggtgagactagcattattattgtgtgctgctctgaagcaggaggccctgcaggtcccagctgtgtgggagagtttcagggaggaaccccaactggccagaccagaagaactagcatctcgggagggagtgggacccagggtggagaggtacctcttgctcaggcctgcccagattctaggcgctgacccccgcctggcccatgaccagagaacagaaggaggtttgaatgcagggcaccacttaagcctgctgcgtggtaggtggctggctcttctgggtcctttgcagattttatggcagagaatctagaatctggctcaggggtcagtgcggaggcagctgccagcaatacagatcactcccaggcctcagacaagcccaggaccatattcactctggatttctcgtctccctgtggcagaccaggctctgacgccagtgaggttcccagcctgactcaggcccactccctctgggacacactgtttgtgacaagttagggaaggagtggagtcagggatggggctgactgtataattttcgggccccagtgc[143 bp omitted]tgaaaccccatttctactaaaaatacaaaaaattagccaggtgtggtggcgtgtgcctgtaatcctagctactccagaggctgagacaggagaatcgcttgaacccaggaggcggagggtgcagtgagctgagatcgcaccattgcactccagcctgggcaacaagagcaaaactccattctcaccaaaaaaaaaaaaaaaaaaaaaaaaaaacaggaaagagtgctgttaaaggtactaaaatagaaacacttttttttcctttcttctgcctcaatcttttttttttttttttttttgagacagtctcactctgccacccaggctggcatgcagctcacagctcactgcagcctctctatctcccggactcaagcaatcctcccacctcagcctcccaagtagctgccactacaggtgtgtgccaccatgtccagctaatttttaaatttttttttgtagaaaaagggtcttgttatgttgcccaggctggtctcaaactcctgggctcaagtgatcttcctgtctcagcctcccaaaatgctaggattacgggcatgaggcactgcacctggccctcagcctttctcttgacccctcatggtgtttaatgttatgttcccttgggcacagagatacttgtgggaccagcacagatcttcaaaggtggctagggaccctgccccacaacgtgggcagcctggctgggttccccatcccaccagatgcccaccgccatgttccaccccaagataccatgaggcacaggtacccaaccctgatcttcttgtggcgtgcctgcagcaggagtggagagtgccagtgatcacggggcagagttaagaagggaacaggccaggcacggtggctcaaacctgtattcccagcattttgggaggcccaggcaggcggaccacttgaggtcaggagttccagaccagcctggccaacatggtgaaaccctgtctctactaaaaattcaaaaattagccgggtgtggtggccagcgcctaaaatcccagctactcaggaggctgaggcaggagaatcgcttgaacctgggaggcagaggttgcagtgagccgagatcgcgccactgcactccagcctaggtgacagagtaagactccgtctcaagaaaaaaaagaggtggggacaggagtggaaacttgtcccagagaggtgaggctgcctcatcatgctttcattatctcattagtcttagcttacaaaacagaaattcaaagatacatttacgaatttctacacagtgaccacagagcattaaacccaagagcagggctcttctgaacacggggagctgtcgtctacattggtcagatgcccatgaagcgggattcagtaagggacccagtttgcagaggggctgggggatgaactgatccaagaatccagatgtcacatacctgaaggtagaggccaagggacacctacagtcccagaggacctaggaatttgggtgtctgcactcccgggactcagagcactatatctgggtcctcaagggaactttttgaggcaggaaagagctgtctccagaatgacagcctagagtgctcaagtgggggaccctggaggactgtagaggcccagaacaggcacctgacccagcctaggggtcagggagagcttcttgaaggaacgggcgccgtagatgagacctgaaggatgaagtcagccaaagagctctgcctgccttgttcatgacagtccccagcccttagcatcactttcccatcagtttattcaaccaccagatgttccctccgtacgcagtatgcaccaggccctctgctgtaccaagggttcagtggtgaccaagacagcactcactcccaggccagagcgggagacagactcaacagcagtgatgatcccaggtagtgaaggccatgatgagagatgcacaggatagaatgatcagggctgggaatggggaggcacaggtggagctgtcagggctataatgaaaagcccagggccaggagcagtggctcacgcctgtaattccaacactttgggaggccgagacaggcaggtcgcttgagcctgggagttggaggctagcctggactacatggtgaaaccccatctctactaaaaatacaaaaaaaagaaagccaggcgtggtgtggtggtgggtgcctgtaatcccagctactcgggaggctgaggcagaagaatcgtttgaacctgagaggtggaggttgcagtgagccgagattgcaccactgcactccagcctgggcgacagactgagactcagtctcaaaaaaaaagaaaagcccagaggaagcatctgacctgccaggacaatcagggagggcttcctggagaaagagacttaatataggaactaaaagctaaatgatgagcagggcttttgtggaatggggagaggtgcctaagcaaagggaacagaacgtacaaaggcccagaggtgaaagggaagcgagttttattttttgtttttttccactttcatggaatgagacatgctctatggtgctgggaacagcagtgaccaggacaatgctggctctgcctcatggagctcccagtgcataaaggacacagatccatcgcccatgatgacccagggtcctcagggatgggatgacagagctcaaaagggggtgcctgacccagccaggaaagtcagtgagggcttcctgaaggaggtgccaactgaactaaggctggaagaatgaggtgcagctgattaagggaaggaggggggccaggcgtggtggctcacacctgtaatctcagcaccttgggaggctaaggtgagtggatcgcttaagtccaggagttggagaccagcctgggcaacacagtgagaccccatctctataaaaataaatagataaaagaaaaaaagggaagaaaagggcagagggaacaacgtaggcaaaggcctaaaggggggaagcctaggagttcctagaaatttccagcagccggtcaggccagaaagggtggaaacagaagggcctacaaactaaaaaagcaaaactgccaaacactaagggggacatgcctctcaccctcttctcccagctatgaccttaagagttgaaggcctccattcctagagagccggctgtgggacgcgtggctcccagaggtaccgataactcagatgtcctgcctaggggtcaaggggccccggatgcctgggctggaaaccacagcagcaattcctgtttttcctccgtatttaattcggtatcacaggagcaccaataaatagtttcttcccgcccctgcaatcttcctcctgccccgggcagggccttaggggccggcgatcccgtcgggggcaaggcacctgcaacccagaacgcagcagctcaggccagctgaactgccgcgcctgcggaattcccgggagagttccaaagcggtgcgtccaagttttccggcagtgggcggggcctaggaacgcccccgcgccccgcgccggcggagcctcgaagggacttccccccaagagggcggggccactcagggggcgtggttttcgtcagcggcggtcacgatgacgtccatccaaatgcgcatggcttcggggctcggagccaccatgtagaaaaggcgttcgtaggttttgacgcagaaggtcaggcgggggttggggctctggaataagcagaaagtgagggtaattcagacaaaagacaccggccacagtctgggtgcgaacccagccttgctacttatagtctgtgtggcactggacaaggtacttaagtatctgaatgtcagtttccctgtcttcccaaatgatgccacctacctcactgggttataaggattaaatgaattaacacaaggaagtgcttaaaattatcatatgtagagcgctattgataaattaggggcaagataaattttttttcttttttttttgaaactgagtctggctctgtcgccaggctggagtgcagtggcgcaatcttggctcactgcaacctccacctctcgagttcaagcgattctcctgcctcagcctcccgagtagctgggactacaggcgtgtgccaccacgcccagctaatttttgtatttttagtacagaccagggtttcacagtgtttgtcaggatggtctcgatctcttgacctcgtgatccgcctgcttcggcctcccagagtgctgggcttacaggcgtgagccactgtgccaggccgagaaatttaaaagtaggacttatgacgccttctctcagcctaacttctcctatattagaaatacaggcattcaaattccacctccccaaaatctaggtccccttgtacctgggaaaagttagtgtctagaatccgttatttgagtacccacttgccaatcccaaattgagtaaatcccttatgtccataatctgtttttagccctctcaataaccctgatggaatgggttgatgcgtacccattctacacgtgagaaaactcaggccggccgggctgggtggctcacgcctgcaatcccagcactttgggaggttgaagcggattgattgcttgaactcaggagttcaagaccagcctgggcaacagagggagaccccatctctacaaaaaaataccagaaaaacaaaacaaaacaaattagctgggtgtggtggcacacacatatagtcctagctactcaggaggctgaggcaggaggattgcttgagcccgagagatagaggctgcagtgagctatgattgtaccactgcactccagcctggtctatggagcaagaaaaaaaaaaagaaaaagaaacaaagaaaactaaggctaaaggctaaagaaaggaagtcactttcctgatgtcacatagctgagattccaacctaattgctaaaaagccacagtttggttattctccacagagctttctaaatattgtatcagttgccaacatttaaatttttggcactgtgctttatacaagttccaattcctgagttctctgggaaaaaataaatataagacaacaccatgggacccactcccacttggcaactgttggcaggagccaactaacaaccatctcctttatttatttttcatttaaaaaataaaaaaaaaaaaacagagatgggatcttgctatgttgaccatgctggtctcaaactcctggcctcctgcagtcctcccatcttggtctcccaaaatgttgggattataggcatgagccacgacgcctggcagatcatctcctttagatgctcccaggctgcccgacccttgctgtgacctctccattcatttattcccagttggacatcagagtc[131 bp omitted]accagcctggccaacacagtgacaccccatctcaactaaaaatacaaaagttagccagctgtggtggcacgcctgtaatcccaactacttgggaggctgaggcaggagaatcgcttgaacccgggaggcagaggttgcagtgagccaagatggcgccaccgcactccagcctgggcaacagagccagactccatctaaaaaaaaaaaaagagccacgtgtggtgcggtggttcacgcctgtaatcccagaactttgagaggctg[132 bp omitted]gagaattgcttgaaccagggaggcggaggttgcagtgagccgagatggcgccactgtactcaggcctgggcgacagaatgagactctgtcttaaaaaaaaaaaaaaagaagaaaattaacagtggctgaaggccagagtctgggctcttaatttttagtccctgcagtcaggtgacctgtttgttttctctgcgacaaacacgtactcctatgagtaccctgacaggagaagctgcgggtggctttccccaggatgagccagggatgagataaggcctgactccaactgagtctccaactgggaggtcagggtgacattgaggggcttcaccttgaaggcacagcgtaagtggtcataatagacttcctcaatggcctggaagtagatgacacctttgagcttggtctcttccttgtctggtaggggaggtaagagaaaaagagagccagtgagaaaggtgtgtctgtgtgtgtcgaggtgagggtcattggccctaagtcctgagactggatttgggtaagaaacatggtgacaagagtctgaaggtctctaaaggttgggaggtgagtgaatgttaacgctggatgggagactgggcacagaaactggacatgattggggagtggggtctgtggagctggaatcctaggccctgaatgctcggcctctgagaagggaaggaactcagggagtgctcaagtgctttctaggtataatctctaaccctctcaaactctcctggaggggtaagtacatttatctccatctgacagatgtggaaaccaagactcagagaagttaaggcacccagcacaagtcacacagccagagctgacagagccaggactcaccaagtagagtcaaatggtcatacaggttagggaagaaggatttgagacaatacaagcgtccaaggaggctgggtgcagtggctcaagcctgtaatcccagcactttaggaggctgaggcaggcagatcacaaggtcaggagatcgagaccatcctggctaacacagtgaaaccctgtctctactaaaaatacaaaaaattagccaggtgtggtggcatgagcctgtagtcccgcctattcaggaggctgaggcaggagaatcgcttgagccggggaggtggaggttgcagtgggctgagatcgcaccactgcactccagcctgggcgacagagcaagactctgtctccaaaaaacaaaaacaaaaacaaaaacaaaaaaaagtgtccaaggagaggtttggaataattgattctcctagagaagaaggacaagggccccagactcctggccattggggggctgggggcagctgacagtgcaggttcagactcatgggtgtcttaggaacatgggccctgggaagcttgaattgtactaaactgttatctatgtccctgaggaggactgggggtttgaattctgggtggcttaaagaggggctggggatctggattccagggtctggaggagagagagagctgggagcctggactcctgggttgtagggaagttaggagctagggaaccaaacttctggatcctggggaacatggaaagtgggggccaggacttctggtgcctgtagaggaaaggcctccggagtggaattccagcgtcctggggcccatggtggccaggctgggcttacccgcatagtaggccaagcggcgggcttggcggtcaaagcagaaccatcgcttcctccaggtcttgatgcggccgcccatcttcaccaggggtccacggcagcagcacccagacacctgcacatgtgggcagttttccgggttgtggccccatccctccagatgctgccggagatccaagattcgcgggcctggagggtggggtggggtgggtggggcctggggagcaaagagacggggcagctgatgtaaggggcgggggattctacagcctggagcccctcgaggggagcaagtcatagcagcttgcatgtaaggcccgctacagcctttagagggtaatattaactaggaccatctgacaaatgcaacggctacgtggattgactgtgatgctctgcccaggactttatggacatcagctccttggcacttcatggcaactgtgagccccattttacaaatgagcaaaatgaggtacagagagatgacataatgcacccgaggtcacacagagcttctaggcagcagaactgggacacgaacccaggtatttctgaccctagagctcaccctgaaacatcagaggcctatcaaaagaaataaagatcgggccgggtgtggtggcttatgcctgtaatctcagaactttgggaggctgaggtaggaggatcccttaggcctaagaattcaagggcagcctgggcaacatagtgagatcctgtctctgaaaaaaaaaaattttttttggaaaaaagaaatgaagattggagcctgtgtggtggcttaagcctgtaattccagctactcaggaggctgcggtgggaggatcccttgatcccagaagttggaaaccagcctgggcaacacagaagaccccttctctatttaaaaaaaaaaaaaaaaaaaaaaaaaaaaggagagagagaagagaagctatgtgcagtggctcatgcctgtaatctcagcactttgggaagctgaagtgggaggatcacttgaggctatgagttggagaccagcctgggcaatatagtgagaccccatctctactaaaaatccaaaaaattagctgggcctagtgctgcacacctgtagttccagctactaaggaggctgagcccaggaggatcacttgagcccaggagatcgaaattgcattgagctatgattgcaccactgcactccagcctgggtgattgagtgagaccctgtctcaaaaataaaaaagaaagagagagcttgtttacattattattgttgtgatgaaattaatgaatataatcctctgctaagtactttctaggtataatctctgccccctcaaactctcctgaaggggtaagtacatttatctccgtttcacagatgtggaaaccaagactcagagaggttaagtcactcggcacaagtcacacagccagagctgacagagccaggactcaccaggtagagtggtcacctcagatggtcatacaggttggggaggaggatttaaggcaatacaagtgtccactatttatgagagcctgaccatgagctggtctgatccaacctattcttcccaaataatccctgcaaacagtggtatgattccggaggtcaaactgaggttcagggtagtacatctcagatttcttcatgcaagcagatccgctggggattttgttaaaatgttaaaatgcagactctgattcagtcatttcagggtggagtctggagtagggggagaggttctgcatgtctgacaagctcccaggtgggccctgatgctgctgttccaccagccacactttgagtgtcaaggagttagaaaactgaagcaggatgggtgcggtggctcacacgtgtaatcccagcactttgggaggccaagaggggaggatcacttaaacccaggagtttgagaccagcctggggcaacatggcgaaaccccgtctctacaaaaaatacaaaaattaggctgggcgtggtggctcacgcctacaatcccagcactttgggaagccaaggtggggggatcacctgaggttgggagtttgagaccagcctgaccaacatggagaaaccctgtctctgctgaaaatacaaaattagccaggcgtggtggcgcatgcctgtaatcccagctactcaggaggctgaggcaggagaatcgcttgaactcgggaggtggaggttgcggtgaatcaagatggcaccattgcactccagccttggcaacaagagcgaaactccatctcaaaaaaaaaatacaaaaatacaaacattagccaggcatggtggtgtgtgcctaggatcccggctaattaggaggctgaggtgggaggatcgcttgagcccaggaggtgggggttgcagtgagccgagatcacaccacggcactccaggctgggtgacaaagggagaccatgtctcaaaaaaaaaaaaagaaagaaaagaaagaaaactgaagcaaggccagagcaagaagggatgagaaacagagatgagatctgctggttggagacaggagagtgaggtggggaaatgagaaggattagggaggagggaaaggaagggagggaaaggccaggtttaaagagtacccgctgggcctgcaatctccccaaatccacacagaaagaccaaggatcaccactgtgtgtggaagctcccgctctgtgtcaggcactatgccaagtggtcactgtgattacctcgtttcttctccaaaagaacccattaatgttcctgctagacagatcaagaaactgaggctttaagaagaggtgactctccaaggtcaccaaactaggatgtaggggagctgggccccaatctaggaggagaccagggatgggcttgggactccaccactgcccggctgtgtcacctccacagaactcctgcccctctgggagcctcagttccctatgctaaaacaccagggttatcacagcactctcctctggggctgtttcaaggatgagctggctgccctcagggtctctcacctagaggttcctcttctaggtgtgaagcccagggacacacttgctcacgtgcacaaaagatagcaggggtgtacggcaggggacaaagcacacagcaggggactgtttaataaatgatgatgctagaagccaggcagaacaccagagcaggagcaattctgtttgtttgtttgtttgtttgttttgagacagagtctcgctctgtcacccaggctggagagcagtggtgtgatcttggctcattgcaacctctgcttcccagttcaagcgattctcctgcctcagcctctcgggtagctgtgactataggcacatgccaccacgcccagatgatttttgtattttcagtagagacggggtttctccatgttggtcaggctggtctcgaactcctgacctcaggtgatctgcccacctcagcctcccaaaatgctgggattacaggcgtgagccaccacgcctggcctgtgcttcgtttttaatgagcacaagcttatgcctaacaatgcagaagaccccactgccgttcctgccttattttgctccctggctcttatcagcctctgacatgctatttattttacatattgatgttgctttgtgtccatcttcccccttaaaacatcagcttcccccaaaggtggggattgttatcttggtcactgctatgacccagggtctagcacacagtaggcactcaataaatatgggctgaaatgaataagggaaggacaaatggtggtaaaaacaaaaaggttgggaaggatgtgcttatttatgagacaaattcacaaaatatggcttgactggtgcatgtggaaaagtataaacacagatttgaaggcttctcagcagtagaagtgagatcaggaagaaagtgaccactttcttaatactttatctatcattcttttttttttttgaggcagggtctcactctgtcactgaagctggagtgcagtggggcgattatagctcactgcagcctccacccactgggctcaagcaatcctcccaccttagccttttcccgagtagctgggaccaaaggcatgcaccaccacacctgctaattttttaaatttctgtagagatgagggtctgactatgttgcccaggctgttctccagctccgggactcaagtgatcctcccacctcggcctctcaaagtgctgagattataggcgtgagctatggtgcctagctttatcattctttataacaaaacgcattgattctatgaatgttattagtataggcaaaaatgtaatttatgtaagggagttgtcagctaaatcaagaatgtgaaaaagtcaacaggataaattatttgattatttccacaaataaatagcattttctttaatggggaggcagaactgttagagattaaaagatttaagagacattaaaccaaatgcatagcgtgtgctttgcatatagattcaaataaatcaactgtgaaaagatattttaggtcaggcatgatggttcaggcctataatctcagcactttggccagaagggaggctcgaggccaggaattcaataccagcctggccaacatagtgtctctactgttaaaaatggaaaacaaggccaggcacggtagctcatgcctgtaatgccagcactttgggaggccaaagcgggtggatcacctgaggtcaggagttcaaaaccagcctggccaacatggtgaaaccccgtctctactataaatacaaaattagccaggcatggtggtgggcgcctgtaatcctagctactccagaggctgaggcgggagaatcgcttgaaccctggaggcggagattgcagtgagccgagattgtaatactgcactccagcttgggcaacaaagtgagactccatcttggaaaaaaaaaaaaaaaaggaaaagaaaaataataaataaatttttaaaaacatattttggagacaatgagagaaatgtgaatatggactatatattacaatataatgaaattaataatctcataagatgtgacaatggaatttttgttatgttaaaaaaaaaaaaaaacttattggccaggcacagtggcttacacttttaatcccagcactttttgaggccaaggcacacagatcacctgaggtcaggagttcaagaccagcccggacagcatggcaaaaccccatcgctactaaaaacaaacaaaaaaaataaatgggtgtggtggtgggcacctgtactcccagctactcgggaggctgaggtagaagaatcgcttgaaccagggaggcagaggttccagtgagctgagatcacatcactgcactctagcctgggcgacaagagtaaaactctgtcccccaaaaaacaagcctatctattggagatacacagtgatgtttgagtgaaaggatacaatattttgctttaaaatatttcagtgcagagtgggatgtaggtatgggattagtaaaataaaattggtggctgggcaccaatgccctagaattattcttataattctagcagcttggaggctgacatgggaggattgtttgaggccaggagtttgagatcagcctggacaacatagcaagactctatctctacaaaaataaaatacattaaaaatataggagtgcagaagacttatgagaaaaaaagaaaaatattaaaaataaaaataaaatatatatacctagtacatacacaaattaaaatgttaaataaaataaataaaaagttggcaagtacaagattcaatattgaaaatgattaaagctgcgcagtgggcacctgggggtctattaatctactccttctctcatgcatatgcttgaatatttctatcgtaaaaaggttttttgtttttttttttgagacagaatcttggtctgtcaccaagactggagtgcagtggtgtgatcttggctcactgcaacctgcacctcccaggttcaagcaattctctgcctc[221 bp omitted]ttggttttgatttttttttttttttgagacagattttcgctcttattgccaaggctggagtgtagtggtacaatctcggctcactgcaacctccacctgcgggttcaagtgattctcatgcctcagtctcccgagtagctgggattacaggcatgtgccaccatgcccggctaatttttgtatttttagtagagatggggtttcaccatgctggccaggctggtcgcaaactcaggtgatccacccgccttggcctcccaaagtgctgggattacaggcatgagccactgcacccagccaaaaacaaaattttaaatgatttttaaaagttccagcatggactgggcatggtggttcacgctataatcccagtactctgggaggctgaggcaggaggattgcttgaggccaggaataagtcccagcatggacttgtcctccttctgtactgactgctgacattgtcaccaatgtacagaagaggaaaatgaggcagagtagagcaagttacccgaggacctgccacacatggagatgaccatcatccggtcatgggaacaggaactggtcctctgcagttccctttcccttgccaagcccaggacaattttctgttcaattggaggagaggaaagggtcagatgtaagaaagggcataggtcagggggagaaacagagcagggagaggtgggcgtgagggcgggggtgggactgaccgtgatggcaggaacagcagggcctgaggaaccttccgtgccccttcttgttccttcctgtggattcaggatgaagcactcaatgaggatcccagcccataagatggtagggtggctggagaatgtcctagcttctctgttctgagggtacagggactgggggcctggactcctgggtatgagggaggatgggctgggggcctggactcctgggtctgagggtggaggggctgggggcctggacccctgggtctgagggaggtggagttgggggtctcccaggtctgagggaggagaggctggggcagtcttctgttccgaagaggatggcctgggctctcacccgggccttgagcagccgctccctctccgccatggcctgctgcaggagccgctccatgtgggcaatgtctggatggatggccccacagctaggaggagggaacacagacggggtgggttacagtggctgggcctcttcttccatctccccaccttctctctgatgtctcacctattcccacggccacagttcagcagctggtagagggggtatctgccggagtcccccactgctggcgggagagctgaggcctccagggattctagggtagaggggaccaggttacagggctggatacaccctggcctgagcctatccacttctcccctgcaggcataggtgcgggtttcctccatcctctgctgcaggatgagtgctgatgtgggaaggaagtggggaacagggggatcctcaccagtacaatggaaggacagaggtcggggggatcctctctggctccccctctccccccttttccggggcaggctcccagtcctctggaggccaatggagccctgaaaacacaaaaggctcatgagcataggaaaaaggcttgatctccaacctaagtcagagcactgcccagtgaagccaccacccagtcagcacaaatcaaaacactactgtccatgtgctgagtgaaaggacctcacaggggtatgatcccgtttataagaaatatcaagctgagcacagtggcttatgcctgtaatcccagcactttgggagtccaaggcaggtggatcacctgaggccgggagctcgacaccagcctggccaatatggtgaaaccccatctctactaaaaatacagaaattagccgggcatggtggcacgcgcctgtagtcccagctactcgggaggctgaggcagaagaatcgcttgaacccgggaggtggagattgcaatgagctgagatcgcgccactgtactccagcctgggcgacagagcaagactctgtctcaaaaaaaaaaaaaaaaaacacagaaaagaaaaaaagaaatgtccggaacaggcaaattaacatagaaatgggaagtagaattgtggttgcccggactggggtagatcggggaaccgagaggctaagggatgcagggtttcttttgggggataatgaaaatgttctaaaattgattgtggtaatgtttgcgcaacgttgaatatactaaaagacacagaactgtacattttaaatgaatgaattgtatagggacgtgaattatgcctca[212 bp omitted]gaggcaggagaattgcttgaacctgggaggcaaaggttccagtgagccgagatctcgccactgaaatccaggctggacgacagagcgagactctgtcgcaaaaaaaaaaaagtcccactgcagccaggcgcagtggctcacacctataatgccagcactttgaggctgaggcaggcaaattgcttgagcccaggagttggagatgagcctgggcaacatggtgaaactctgtctctacaaaaaaatagaaaaattagctgggcatagtggcacgtgcctgcagtcccagctactgtggaggctgacgtggaaggatcgcttgaaccccggaggtcaaggttgcagggagctgagattgtgccactgcgctccagtctgggcgacagagtgacagcctgtctcaaaaaaaataagtaaaacaaaaaaacaaaaaacccaccgtgctggtggctatgtaggaaacccagatgccctcacatgatactgggggtgttctactggaacaagctttatggagggcaacttggcttttttaaaaaaaatctgaatgacaaatgcataaaccatggagccccaattccaattctagaaattcagcggatggatacactcatacacatgcaaagtgatctgagttcaaggtgattccctgcagtgccatctgtgctagcaaaagcctggagaccacctaaatgcccatcagaaggggacaaggtaaatgaaccatggcttatgcactccatagaccattttttttttttttgagttggagtctcactctgttgcccaggctggagtgcagtagcacaatctcggctcattgcaacctccgcctcctgggttcaagcgattcttctgcctcagcctcacgagtagctgggattacaggcatgtgccaccacgccaggctaatttttgtatttttagtagagatggggtttc[148 bp omitted]cctacatccaggtagaacataatatccaaaaaagaaaagaaaaaaaacagaacataatatccaagagaaaaccaaggccaggtgtggtagcgtgcacctgtagtcccagctactcaggaggctgaggtgggaggatcacttgagcccaggaggttgaccctgcagtgagccatgatcatgccactgcactccagcctgggcgacagtgagatctatctcttaaagtttttttttttttttttttaagcgagtacagaacagcatagaataaactaggtatgcataaaagagggagaaagtacatacatgactagctgtgtcaacacagaatatctctggggaacacatgggaaattggtaaccctggtggccctcaggaagtgaacagcgtaggagggggaacaagagccgcagagtcttctctgaatatcctcccacaccatgtgaattttgaacgaggagaatgttaactttttaaaagcaaataaacatgacaactaaatgcaacctgtgttcctgagccaagaaaaaaaaagtttgtttttttttgtgaattttttgctagaaaaaacactggtggggccaggaacagtggctcatgcctgtaatcccagcactctggaaggccg[134 bp omitted]gaggcaggagaatcacttgaaccagggaggcagtggttgcagtgagccgagatcacaccactgcactccagcctgagcggcagagcaagactctgccaaaaaggaaaaaaaaaaagaaagagcaagagagagaaaaaggaaggaaggaaggaaggaagggaaggaggaagggagggagggagggaaaaacattggtggaacaactgacaaaatacaaataaggtctgtggattctaatagtgttgtctcagtggtagtttcctgaaatcgatcattgaactgtggttgtgtaagagaatgggcttgacattaggtagtaaatttaggaatatttaggggttaaggggaatcatgggtaagaaaataatgggccaggcatgaaggctcacacctgtaatcctagcactttgggaggtccagggaaggcagatcactttagctcaggaatttgagaccagactggggcaatatagtgagaccccatgtctacaaagaatacaaaaattagcctggcgcatgtctgtaatcccagctacttggggggctgaggcaggagaatcgcttgagtctgggaggtagaggctgcagtgagccaagatcgcaccattacactccactccagcctgggcgacagagcgagactgtctcaaaaattgaaaactaaaaaaaataaaaactctgggagttgagaaatgttagctccacttcacagagaagaaactgaggctcaaatccccgtgctttacttgactttttccttccttccagccacattcccagcacttcctagctgggagatattagatacttggcactgaggaaccaagtgggcaggtcagaccccagctttgtctgcagggcacttatgttgtaggaactgcataagccatcagcaggccatagaaacaggccggttcgggttcaaatcccagctctgccacttcctgggtgcatgacgtaggcaagtcatttctcttctcaagcgaggtgtcctctctgtaaagtgggtaacatctcactgcccttcctgggttgttgcaaggattaaatgagtgacctcctgcaatgcatgtagaagcatgcatggcccccaggtgagatccaggagctaagcaatgatccacattggtgggtacagggtgcacctgggcttagaggccttctgtgcacaggggccaacaagtcaggtgacaactccataggactggacatggcgtcccaccaaatattttcatatatgcaatttactaataagggtaattgctatcctaagtcacgttgcctggcaacacagctgacacctaccttcatcaggtttccaggggaagcagccagaaagttaatttcccatacagaagaacatctgctaacccttcacccaaataataacggaacctgcttgtgagggttcttcccaagaaaaaatgaaattttatatattaggttgagccaggggaattgccagtatacgactgtttcttgcctccaaatattagcaattccataagattcaaagtgataaaatggtttagaacagaccctgacctatattaagtgctttaaaattagtgttattaatattgattaataaataacaagattttttttttttaagatggagtctcgctctgttgcccaggctgtcatgcagtggtgcgaccttagctcaccgaaacctccatctcctgggttcaaactattctcctgcctcagcctcccgagtaactgggattataggcacgcaccagcacacccagctaattttttttttttttttgagacaaggtctcgctctgttgcccaggctggagtgcagtggcatgatctcagctcactgcaacctccgcctcccaggttcaagcaattctcctgccaaagcctcctgagtagctgggactaggctaatttgttgtatttttagtagagacagggtttcaccatgttagccaggctggtctcgatctcctgaccttatgacctgcctgcctctgcctcccaaagt[135 bp omitted]ttccgggttcaagcgattcttctgt[134 bp omitted]gcctcccaaagtgctgggattacaggtgtgagccaccgcgcccagccaattttttgtatttttagtagagatggggtttcaccaagttggccaggctggtcttgaactcctgtcctcaagggatccacccacctcggcctctcaaagtgctggattacaggcatgagctgacgcacactgttattatttatttatttttaagacaaagtctcactctgtcgcccaggtctggaactcctgacctcaggtgatccatctgcctcagcctcccaaaatgctggggttacaggcatgagccaccaagcccagcccacacactggtattcttaacagtattgcttaaactgcaggatggcttgagcctgggaggcagatcgtgtcactgcactctggcctgggtgacagagccagaccctatctcaaaaaaaaaaaaaaaaaaaggaaaaaagaacctaagttctgaaaacagagtacctgggttcaaatcccagctctgccacatactagctggttaaacaacttaacctctcttggtgtttttgcctataacatggaaacaagaacctagctcacagatttgttgcaaagacaaatcagtaagccaatcagcatgaagcatttgtaaccatgccttgcacactataatgactcaataaaaccattgttattattattgctattgttaatgttattattattattattgtaaagtcattaaaaatgaggcaactgtaaatgtatcaatgtaaaacaatctccaagatagagttaagttaaaaaataaaaaccagtgggccaggcacagtggctcacacctgtaatcccagcactttgggaggccaaggtgggcagatcacctgaggtcaggagttcgagaccagcctggccaacatggcaaaaccccatctctactaaaaatacaaaaattagccaggcttggtggcgcatgcctgtaatcccagctactcaggaggctgaggctggagaatcgcttgaacccaggaggcggaggttgcagtgagttgagatcgcaccattgcactccagcctggcaataagagtgaaactctgtctcagaataaataaataaataaataaataaataaataaataaaataaaagccagtgagaccctatctctacaaattggacccatgcgcggtggctcatgcctgtaatcccagcaatttgggaggctaaaacaagaggaccatttgagcctaagggttcaagaccagcttgggcaaaaggaagaccccaactctacaaaaataacttcaaaaatcagctgtgtatggtggtgtgtggtgcatgcctgtggtcccagctactcaaggaggatcacctgagcctgggaggttgaggctgcagtgagctgtgatcccaccattgcactctagcctgggcaacagagtgagactctgtcaaaaaaaaaaagctagaagaggacttgaaatgttctcaacacacagaaatgataaatacttgaggtgatagataccccaataccctgacttattacacattctatgcatgtaatagcatatgtaccccataaatatgtcccaaatatatcatttttaaaaagaaaagccaactagtagctaatatacacatttttcagaaggacaggttgaatatcccttctccaaaatacttgggaccagaagggtttcagatttgggattttttttcagattttggaatatttgggttgagcatccctaacctaaaactctgaaacccaaactgctccaatgtgcatttccttggagtatcatgtaggcactcaaagagtttcagatttttgagcattttggattagggattttttttgtttgttttttgagacaaagtctcactctgtcgcctaggctggagtacagtggcataatctcggctcactgcaacctctgccttctcaggttcaagtaattctcgtgcctcagccctgcatcaccatgcctggctaatttttgtatttttagtagagatggggtttcaccatattggccaggctggtctcgaactcctgacctcaggtcatccgcttgccttggcctcccaaagtgctgggattacaggcatgagccaccatgctgggcgcctgttttaactataaatgagctgcccccccaccacccccgcagttttaaggaagtctagaaggattctcaaaacacaagtagctgcgttacttctgagaaggggagaccttattaaaatatgctgtttggttgcttttaaaatctactcctgggtgcacatgttcccatttcgccagggcaggggtgggtgttacacagaaaaaaaataacaataataaagctggagtcataggaataacccttggccaaccttccctatcccccaccggccccatacagaaaatcagagtggaagttctggagaccccagttcggggactctgctgttagcccctccctcctcactgaccaataagatatatggggaaacagaggccgtgggggaggcacctgcagggagctgtggacagaaaagaggcaggaagaagtaggggtggcagcggagtgggccacggcatcctggagcaccagcagctggcggtctgtcttctgggtgaacagcagctgcaagagatggggtgaagtttcgtgggagcaggagagaccccagagcaactgccagtttccacgtgctctggcccatgcctctagtgccacccatttctcagaaagaaaaactaaggagagatggaatgtggtccttcgtgtccagtctcccaatgtagggctgtgggcagagactcctggctccctgaggaggggctgggggctggactcctgggtctgagggaggtggggctggggcctggactcctgggtctgagagaggaggggctggggcctggactcctgagtctgagggaggaggggctggggcctggactcctgggtctgagggaggaggggctagggcctggactcctgcgtctgagggaggaggggctggggactggactttcaagtctgagggaggagggactgagaggcatacaaaatccccataccttagtgagggccgggttgggctcagagaagtccccgccaggtgttccctgaaggcaattgagctcgagcagccggctccgttcctaccagaagatatggacagctacgtgtcaaagtcagaatgggctgtcccagctgctttccctaatgtcaggagacatctggggtgcagggaggtggtgggatgccccagggggaagtgaggacggtagggtagggcaggtgacaggtagctcacctgtgacagggcctgaagggcctcctccttcttccggctcaacccccggctctcggctgccatctgctcccccagtgacttgagctgctcttccaggacccggatccggtgctgcagagcacccctctgtcccggttactcatctgtcacggccccagccagctctccaggccaccctcccacagaaccacatctgcctggagggctggggtttactccagccactcccagagaccatgggatcggagtgtccagggctggggacccagcgttcagctccctggaccctcttcccttttgagggtccagaagagatctggggaagatgaagagaaagggatggacagagagaacagtaaccaagacaggccccaaaagacagagatgtagacaaagattcaggcaaaagaaaagatagaaatagaacagagacaagtagagacaacccgagacgaaggaaaagccagcgggagaggaaaaagatccagaagcaggtggggaaaggagacccaagaaaagctctttttttttttttttttgagatggagttttgctgttgttgcccaggctggagtgcaatggctcaatctcggctcaccgccacctccgcctcccggattcaagcaattctctgcctcagcctcccgagtagctgggattacaggcatgcgtcaccaccctcagctaattttgtatttttagtagagatgggctttc[132 bp omitted]tctgtgttaaatatggtcaaacatgcccattttttcccaagggtctcacaagtcagacccttgaatgtgaggctcccaggaaggatctgatgaagcatctttttggaatagaggcaaagaatgtggtggtgaataccaagtttgttcaaatcctggctgtggcgaggcacggtggctcatgtctgtaatcccagcatcttgaaaggccaaggtgggaggatcgcttgaatccaagagtttaagaccaggtgaaaccctgtctctactaaaaatacaaaaattatccaggtgtaggggctcgcacctgtggtcccagctactcgagaggctgaggtgggaggatcgcttaagcacaggacgtggaggctgcagtgagctgtgaacgtgtcactgcactccagcctgggtgacagagtgagacgctatctcaaaaaataaaaataaaaaaatcctggctctgtcccttactaaggaaacttggaaaagattacttaagcaccttgaccttcagcttctttatttataacgtgaaaaaaaaaaaacgtaatagaacttgcctcataagtttgttgtaaggattcagtgaggaaatgctcatgaaatattcaggaccatatctggcacatagtaaatgtttcattagtatcagctcttgttgttactattcagaagaacatgacaggcaggaaacaaggacagagaaaaaggcaggcacagagcaggggagacagagaggagcagcaaggggggcagcgctggtcaggcatgactcactctgtgctgcgccatgctggcctggagttcctggaccttggggtctggcacctggggcccagggctgtcccgatcctcctcctcctgccggctctcccgctccagttgctggaactccaggtcctcataggcacgttgggccacatccagttgttccctcatctataggtcggaacacaaaaagggtggaggcctgaatccctaagaccccagggagtagtgggctggggctgggactcctggtcagaggaagaaggtgactgaggacttggattc[142 bp omitted]accccgtctctactaaaatgccaaaaattagctgggtgtggtggtgcgcacctgtagtcccagctacacgggaggctgagatgggagaatcgcttgaacctgggaggcggaggttgcagtgagccgagatcgcaccactgcactccagcctgggcaacgaggcgagactctgtctcaaaaaaaacaaaaaagaaagaaccagatgccattacctcctgcacaccctgcagaagccgctcgcgttggtcctctggctgtgagtcgagctgtccctgggccttgcggagtctctggcgaagaccctctaggcgatcccgttcctggctcagccgcctctgttcctgaaagaacaacaaggttctcaccctcagcttaagcatagcgggagaagcagcagccagccatatctcagagcctgcctggggtgtcggctgtacaaaggcagggacttcatctatgtgattcactcctgtgcaggcctgcctcacagtcagcaccaagattttaaagaaatgaatgaggccaggtgtggtggcccacacctgtaatcctagcactgtgggaggccaaagtgggaagatctcttgagcccaggtgtttgagactagcctgggcaacatagggggagcccatctctacaaaaaaacaaaaaaattagtggagtgtgttagtgcacgcctgtagttccagctactcgggaggctgaggtgggaggattgcttgagccagggagattgaggctgcactgagctgtgtttgcatcactgttccagtctgggtgacagagggagacactgtctcgaaagggaaggaaaggagaaaagacagaaaagaaagaaagagagaaagagggaaggaacgaaggaaggagagagagaaagaaaagagggagggagggaagagaaagaaaaagaaagaaaaggaaaggaggagaaagagaaacaaaaaggaaggaaggaaggaatgatggaaggaaggaaagaagaaagaaaattaatgaatgcaaaacatattcatgttatgtgatacggtggatgcagaagtggattgtgtctgggccctgtcctccaagtgggaacacagccagttggaaagatcagggcagtaaaatccagagactgtgggaacccagaatgaagaacaatgtcagccagaggttgaggctgcagtgattgcactactgcactccagcctgggcgacagtgagaccctgtctcaaaatcaaaacaaaacaaaacaatcagggagcatttggatctgggaaaataaaaggagctagaagagcattttgggcagaggaagcggcttggcacaaatgcatgaaagttgaaaagtacaagaagtctgggggacaaactccagccagggtggaagaggatgtggtggtgggaagaacgtggtgggagaggacagtgggaaggccagctcgtccagctcacggggggtttggtcaacctggggatatggggagcctcagaaggactgaaaggatggggtaggagctaggaatcatccctctgggagatgggttacaggggtggagagcagctgcctcgggagtcctccaagcaatgagggtgagacctaagctggggcctgggcggtggggctgaaaaatagatggactagacagagaggatcaggaagcagaaaggataggacatggtggttgacgggcttggaggtgagagacagggaagtgtacagggcaaagtccaggactctggcctggtgaccaaagggacagcaagacaaacagtgtggagaagggagttgctgaggtcagccagactcctgggtcagagggaggaggggctggggcctggattcctggatctaaggaaggaggatctgggggtctggacttctgggtttgagggaggaggagctgggggtctggactcctgggacagagggagaaggggctgcgaccgagatttctggatctgggtgagaagggagtatgaagtagccagtaccctaggaagaagagcacatttctgtctcaggagagagggcctgggagaaatatgtgatctttgaggataaatgagggcctaggacccagcctcataaaattccaacatacacgacacttgcaaagaaaaaaactgacaaaatcacaagtcaccattttccaacctataatggtaactgacccaagcaatgaccactgatggatgttacaatcttcagataaaagattcttttttttgagatggagttctgctcccgttgcccaggctggagtgcagtggtgtgatcttggctcctgggagctgcaacctccacctcccggattcaagcaattctcctgcctcagcctcccgaatagctgggattactggtgcctgccaccacgcccagctaattttttgtatttttagtagagatggggtttcatcatgttggccaggctggcctcgaactgcggtggctcatacctgtaatcccagcactttgggaggccaaggcgggcagatcacctgaggtcaggagttcgagaccagcctgaccagcatggagaaaccccatctctactgaaaatacaaaattacccgggcatggtggtgcatgcctgtaatcccagctactggggaggctaagacaggagaatcgcttgaacctgggaggcagaggttacggtgagccaagatcacgccattgcactccagcctgggcaacaagagcgaaactgtgtctcgcaaaaaaaaagagactagggtgatcttattaggtcgggacaaccagagatgaggttcccaacactggctcaggaagcactaaagcacttctgaatacgatcaaacctctccctctaaccaacacccacttgcagaaacagaggcatgttcaagggcaccacaggcatgcgatcagccatgctctgcctataggacagaagactggatttttccaataaacagtatggggaagacacagcgggtaggaaccaccagagataaaacaatgggcaagacgtatcagccaatcacactgaactttggggacttcattcaaacaagccacctgttaactggcattttgagactgtctgggaaacacaaaaactaaccagaaataagacaatactaagaacttattaattttttatttttgagacagggtcttgctctatcgcccaggttggagtgcaatgttataatcacagctcactgcagcctctaccttctgggctcaattgatcctcccacctcactcttctgagtctgaggccacaggcacatgccaccatgcctggttaatttttgtatttttatttttcacagaaacggtgtcttattataatattgccaggctggtctcatagtcttggcctcaagcgatcctcccactttgccccgccccccgtaccccccccccaccccgcaagtactgggattacaggtgtgagccacttggcccagcctaaaaggatttcttatctgtcaatgatacactctaaacatatgtacagaccatatgatgtctgggattggcttttaaaactggggacgagaacaaattggagataatgaaacaagaatgtaagaatattaatcattgatgaagctggtgggcacaggacatgggagctgcctgactattgtggggtgggtttggaagttttctttttctcttttttttttttttttttttttgagacggagtctccttcttgtcacgcaggctgctggagtgcaatggtgcgatcttggctcactgcaacctccatctcccggattcaagcgattctcctgcctcagcctcccaagtagctgggactacaggcgcccgccaccacgccctgctaatttttgtatttttaagcagagacggggtttcgccatgttgcccaggctggtctcaaactcctgagctcaggcaatccgcccgcctcggcctcccaaagtgctatgattacaggcgtgagccactgcttccggccagtttggaagtttttacacacccacatttaaatagcaaacggacaggggacaaaggaagagccccaaaaatctcgcccagggagggagaaggaaaaccaggaggggcatctgcccctcactctctcaggagcccaaatgtcttcctttggggaatggggacaaccccggggcgcaggtggctaggagcacaccaacatccatggaccaggaaggacactgctgatgaagacccggtgagccaaacagacctgttcccgctgctggcggccgcgctgctccgaggccgcctgctgctccagcagctcccgcagctgctcctcctcccggcgagcggccactcgctccccagccagctcaccccgcagcaaggccacctccacctccatctgcggagagaatgccagggctgggggctcggacgcctaggtccaaggaagaggcccagggcctgaactaccggattcgaagggaggatggactccagggacctgaatttggagggaggaagagcggagggcctaaaatctgatcccacccgaggaaaaagctgggagtccggctttgcgggttccgcttgagttggggccaggcttcccaaggggtccgcagcctcacctcgatcctcagctccttcctctggcgctgtagctccttcactcgctgctccatcagggccacacgagtcaatgcctccagctgctgtccttgcaggcgccgcgccgcccctcgcaccccttcccgcgaagaggtggatgcgggaggtgtggccgccatagctatcggaggcgtagcctcgggctgaagttgaggggggcgtggttaagtggagatgcctcgccccctgcaatcactaagtaggtctggtccccacccaacatcaccctctgcgggtctcagtccatcagtccacttacctaacacaaccaccactcccataatctgtcgcaggctcttttctttttctttcttatcttttttttttttttgtcctgagatagggtctcactggctggagtgcagtggcgcgattacggctcactgcagcatcgacctccctcgctcaagcgattcttctgcctcatcctcctaggtagctgtgactacaggcgcgcaccgccacgccaagctctttttttttttttttttttttggcagagagggggcgatgctatgttgcccaggctggtctcaaactcctaggctcaagggattctcccacctcggcctcccaaagtgctacgattacaggcataagccaccgcgcccggcctcagacccctgtatttaaggtcggagtgggggagggtgcaagtcccgtgaccacccaaccacacggaccacagaggcttgcagtaccgtatggagggtgagcaggtgtaaagccgacttatgaaaggtgtttctttttctctatcaggtcctattctcttggcgtcactttcttgtagtgcctggatctgtctctgtctctccacctgaccccagtctctcagattcggtatctgtccactagatctgtccactagaatcactagatctttcttcctcggagtatgtccctctctcgaggtttttgtctatttgtttctctgagcatctctgccatttatttctgggtttccctctgtctcgattcccctctctctgactctagtctcactgtgtctctgtctttttggggtctttgtctctcagtctccatgtctctgggtctctgtctggcttcttgatctctctgcatctcttactcgtttggttctctctgttctgtagtctctcctgtctgtctatctggtctctctctctctctctctctctctctctctctctcatttttagagataggttctgctttgtcccaggctggggtgcagtggcgcagtcatagttcaccgcagcctacaactcctgggctcaagcgatcctcctgcctcagcctcccgagtagctgggattacaggcacgcggcactgcgcttggacaatttttgtattttttttttctctagagacagggatttgctatgttgcccagacttgtctcgaactcctgggcttaagcaatcctcccctcggcctccccaagtgctgggattacaggcgtgagccacctatctggttcctctatactagtctctctgtctctgtcgcccgtttgggtctatctccgttcttggggcctccccgtggctctatctggtttctgtctctgtatctggtttctgtctgtctgtgcctctgcctctctggctccgtgtcctggtgtatctctctctcagtagtctctgctatcactcggtctctctccctgtctccgggtctctgtctttctggtttccctctacctgtctacctgtctggccacctgtttgggtccccgtcggtccaagccccccgcgctgtcgccctcgggcccctcaccgcgtcgcggctgctctcagtgctgctgccttctcccacttcttcttcctctgcctgctgctcagctcccccgcggctcgaaggttccgccaggacttcggatgcctcctgttcccgggactcctcgggatggccctggggctggacctccacgtcgcattccgggaccagcggcggcggggtcccctcctcggggctgcttcgcgtccccatggccgctgggactcctgcggggtgggcgggaccagaagctccgggggcggggcctaggacggctgagcgccgctcgcgtctgctccggggcgcggagacccccccccaaggaggcggggcctaagagttcaaaggatggaactgagcgttacggaggcgtgtcctgaagtttccagaggcggggcttgatggctccaaggcgacacgccaccggagacgggaccggaatttgagtccgggtcgtagcacgccccctactgacctcttcgaccccgcctcccctccctcatctctaggtgtcaggccttgtaccctcccagcagccccctacaatctcttggattcgcttagagcgacccatcttctccctccgagactcagcagttcggctcccgccccatccttcccggagccccgtagtcttagtcccgaccccactgtgcagggcaaccgtgcccacgccgcctcacccagggatccaggagtcggggctctccttctctgaacaagccaggagtcggagtccttgagattccgaagtccaactgccacctccccacagcctcggccccctcacgagctcaggcttcggcgcgctccgctctgcgcgctgggcacggccgcttctgcctatgagacaggtggcaggggaagagggaggagagaggccgcccggtccccctccccagcagcccggaagtggaggggggacaacaggtccaacagctcccgagggaggagggagccacgggcttgccccacccgtggcctcggcatccggccatcccggccccaccggccccggcccggccccaccctcgtggaactcagcatcgcgacctcccagtctccctcgagcccctcattcctgcccccctggaggagtcttggccacctctgtatgggagcctctctaatgtccagaccttgggagttcagaaaggaaggcaggaatggagatggggacgtctcccctctaatgagcccttcagaagggccctgaccggtttggggagctggacaaggggaaggggtgccctgaactgagtcagacacctgcccagagactgagggaagtgtaccgccacccccccacaactttgctatggggtggagggcagaggttaaaggtctcagccagaccctttcctctctgggcgaaaacaggaaaatgaaaacaggaaaataactggtatatgaaaagggatgattagaagtcaagagctgtgtgaaacactttatacccagtcatttaatttcaccctcaaagctgtccagcgagaaagtgattactacctccatttctttttttttagtagagactgggtttctccaggttgcccaggctgatcttgaactcctgggctcaaacaacctgcctgcctcagcctcccaaagtgttgagattacaggcgtgagccaccgctcctggcctactatctccattttacacttggggatacaagctgaggaggacaaatgcacccaaggttggctgggcacagaggctcaggcctgtaatcccagcactttgggaagccgaggcaggtggattgcttgagatcaggagttcaaggccagcctgggcaacatggagaaaccccatctctactaaaaatacaaaaattatgccaggcgtggtggcacacacctgtcatctcagctactccagaggctgaggcaggaggatatctcgagcccaggaggtcgaggctgcagtgagtcttgaatgtgccactgcactccagcctgggcgacagagtaagaccccatctcagaaaaaaaaaaaaaaatgtagccaacatctacacatgttgtaagtggtaaaatgcaggcttcattctctcaaaagtccatgttcttaaccattgcgtatactgtcactacaagccaggaagtacccaaaagatcattctaaatgatagtaactttaatggtgaacactgataggccatgtgccaggcactcacacacattgactcatcagagcatcacaacaccccattattattccttccattttagagataagaaaactgaggcctagagaagtgaagtaacttaccccagggctaagtgggaagtggctcaaaagcaagccggtgttctaatccaaggtgatgagaagacctgccccagatagctgtgtttgtttttgatc[132 bp omitted]aaccctgtctctactaaaaatatgaaaaaattagccgggcatggtggcacgcgcctgtagtcccagctacttgggaagctgatgcaggagaatcgcttgaacccgggaggcagaggttgcagtgagccgagatcgtgccactgcactccagcctgggcaatggagggagactccatctcaaaaaaaaaaagaaaagaaaaagaaaacaaatcttgcaggctccctggcctctccataggaccagaaccccacccctttcggcccagaaacccaattggttcccccagaaaataggtagaagtcagactcacgttaaaaaaagttttatttagggagctccagggaatgcggtgggaaaggagaggtgcagtgtcattgccgccctctcctcccacctagtgcattaatagtggatgggagcatctgacagaagtgagatcaggcagtgggtgtctgcaccccacagcgcatgttggctggaacagcaaagtctgaaaggaagaaatcaaggttaaaactaaggggcctaggtagagttccaggccccactggagacccagaaatcctaggaacctttcctcttcaggaaactagagttttggtcctgagcccactccttccctcagacccaggagtccagtaccccagcccctcctccctcagacccaggagtccagacccccagcccctcttccctcagacccaggagcccagacccccagcccctcctccctcagacccaggagtccagtcccccagcccttccttcctcagacccaggagtccagtcccccagcccctcctccctcagacccaggagtccagtcccccagcccctcctccctcagactcaggagttcagacccccagcccctcctccctcagacccaggagtccaggcccccagcccctcctccctcagacccaggagcccaggtccccagtccctcctccctcagacccaggagtccaggcccccagctcctcctcccccagtccctcctccctcagacccaggagcccaggtccccagtccctcctccctcagatccaggagtccaggcccccagttcctcctccctcagacccaggagtccaggcccccagttcttcctccctcagacccaggagcccaggcccccagcccagcccctcctccttcagacccaggagtccaggcccccagctcctcctccctcagacccaggaccccaggcccccagcccctcctccctcagactcaggagcccaggcccccagcccagcccctactccctcagagccaggagtccaggcccccagcccctactgcctcagacccaggagtccagtcccccagcccctcctcccttagacccaggagtccaggcccccagcctctcctccctcagacccaggagtccaggcccccagcccctcctccctcagacccaggagtccaggcccccagcccctcctctctcagacccaggagtccaagaccccagcccctcctctctcagacccagaagtccaggtccccagctgctcacctatctgctgaggtttaggcaagttcaggttgcccatgattttgacaaactcctcacagctgagggtgagccgagggttcagagtcctctcctcctccacggtggacactgtgaaccctaggggccaagggaggggaaggaaagtcaaggagtctagtgcctcaggcctctcagaactacattccccaggaggccttgggtgcctctctggcaggggctcttcccagaatattcctaaaattgctttccctcctccatggacactatgggaaatttagttttcccccagttccctaagctccacaagtaaggcccaggaaaacccatgccctgcagaattctaggcatctggcagtcacatagtttctacatccacacacagcaggctcaagcactttatctctttttttttttttttttttgagacaggggcttgctgtgtcacccaggctggaatatagtggtacaatcatagctcactgcagcctcaacctcccaggctcaagcaatccttctaccacagcctcccaagtagctggcagcatgccaccatgcctggctaatttcttgtattttgtagaggcagggttttgccatgttactccagctggtctcgaactcactcctgggctcaaatgagcctcctgccttggcctcccaaagtgctaggattacaagtgtgagcccccttgcccagcctcaaacacttaattttttttggccagagaaatttctgagactggtcgtcttcatgccctacaaggattacagagatttacactccactttcaaagttatgtacgccccacacctcttccaggaagccctcaccatggtaatcgtgagcagggtagatcagacagtctcctggaagtgtgaagatcttttcatggaccgagtggtacaaggtcttggcacagcctggggaaggaaagatcagaggtcagtggatcaacaggacagaagactctaaccccttccttcaagaaaagggtaggaggataaaatcactatagctaaaccctctccttcgtgtcctgccaatatccctttgtctaagtagagaacagggaaaggcattctaggcagatggaacagcatatacaaagaattgaggaatgtcaagaaattcagcatggctgtaaatagggttggaatgacaccgtgaagcaccaaagagtgtcatttgtgaccttggctgtcacccaggggatgtcaagtaagggttctgaacaaggaaggtggactagaaggtaagaaactgaagacaaagccaggtgcagtggctcatgcctgtaatcctagcactttgggaggctgaggtgggtggactacctgaggtcaggagttcgagaccagcctggccaacatgacaaaaccctgtctctactaaaaatacaaaaattagccaggcatggtgacccatgcctgtaatcccagctatttgggaggctgaggcaggagaattgcttgaacccaggaggcggaggttgcagtgagccaagatcacaccactgccctccagcct[144 bp omitted]aaaccctgtctctactaaaaatacaaaaaaattagcctggcgtgatggcgggcgcctgtagtcccagctactcgggaggctgaggcag[136 bp omitted]atgaggcccaggaggagagtgtgaagccatggtccccacaagcagctctgagtcctaagtagggggcaaacctctattccaccttgcatttcggcctaaatccttcagcttcctgactgtactgtgaatggataaatgggagattgggagccttggagagaaaaagacagagactgagatgcagagataaggagagagggaagagggaggaagaggcctggggatgtggcttccacggccatctcatcatggcttctgtctttccctctcatccagcctcacctctccccacaagacagctaaattccaggcctagtgttaaccccacattcacacacatgctcaaaggatggcccaaccctgagattctgaaactatactcgctttctacagggaagctcctaaatctaactgcccctagcagctagactccaaatggatcattcattgctccctggcaattaaaccgctggctttaacaacttctttttttatcttttttttttttttttttgagatgaagtctcactctgtcacccaggctggagtgcagtggcgcaatcttggctcactgcaacctccgcctcctgggttcaagtaaatctctgcctc[134 bp omitted]gcctcccaaagtgctgggattataggcgtgagccaccatgcccagccctttgttttttttttttttttagctatatttgtttcttagagagggagtctcactatgttgcccaagctgggctcaaataggtaactaacacacccctgaatctaactgtcccccaacagctaagcccctgaatctaactcttcccatactctagcatgggggtccttaaccctgggtaccggtccgtggtctgttaggaactgggctgtgcagaaggtggtgagcggtgggtgagtgagcaaagcttcatctgtagttacagccactccccatcactcccgttaccacctgagctctgcctcctgtcagatccgcagcagcattagattctcataggagcacaaactctattgcgaactgcacatgcgagggatctaggttgcgttctccttatgagaatctaatgcctgatgatctgtcactatcttccgtctctcccagatgtgaccatctagttgcaggaaaacaagttcagggctcccactgattctacatgatggtgagttacataattatttcattatctattgcaatgtaataataaagtgcacaataaatgtaatgcatttgaatccccgaaactatgccctgccatggtccatggaaaaattgtcttccacgaaaccggtccctggtgccaaaaaggttggggaccactgttctagcaggtaaactccttgaatttaatactgaagccccctaaaagtctaatgtccatccattcattcttgtaacagatacttcaacacttgacacacacgtaactatatgaagatcttgggctggataaaggagctggtcaccttgctggaagtctgtccgcccacacccacggatcaacagggcatctccagtgaaggccatgctgtggtcattcaggacgaaggtgacacagcctggggtgtggccagggctggccctggtctccaacgcctggcaggggtggaagagtacagagatagtcaccaagaagccttctagatgaaactggcccccaaagccccaccctaccccagggtcttatctagataaacattttggtaaaaaatgtagattcccaggctgtaatcttatattatcagagtaaactccaagtggattaaagatttaaatgcatgaaaaataaaaccgcaaagctgtgacacacaacaacaaaaatacaaataatatctgacctctggttaggaaggtgatatggtttggctgtgtccccacccaaatctcatcttgaattgtagctcccataatcctcatatgtcatgggagggaccaggcaggaggtaattgaataatgggggcaggtttttcccatgctgtctcgtgatgatgaataagtctcacgagatctgatggttttataaagggcagttcccctgcacactctctcttgcctgctgccatgtaagacaggtctttgctcctccttcgccttccaccatgattgtgaggcctccccagccatgtggaactatgagtccattaaacctctttttctttataaatgacccagtcttagggatgtctttattagcagcatgagaaaagactaatacagtaaattggtaccagtaaagtggggtgctgctataaggagatgtgaaaatgtgactttggaactgggtaacaagcagaggtttgaacagtttggaaggctcagaagaagacagaaaaatgtgggaaagtttggaacttcctagagacttgttgagtggctttgaccaatatgccgagagtgatatgaacaatgaagtccaggctgacatggtcttacatggagatgaggaactttttgggaactggggtaaaggtcacttttgttatgtgttagcaaagagactggcagcattttgcccctgccctagagatctgtggaactttgaacttgagagagatgacttagggtacctagtagaagaaatttctcagcaggaaagcattcaagaggtgacttgagtgctgttaaaagcattcaagaggtgacttgagtgctgttaaaagcattcacttcagttttatgtattcacaatgatatggtttggaattggaacctatgtttaaaagggaaatagagcataaatgtttggaaaatttgcagcctgacaatgtgatagaaaaaaaaacccattttctgaggaaaaattcaagcctgctgcagaaatttgtataagtaacgaggagccaaatgttaatcaccaagacaatgggaaaaatgtctccagggcatgtcagaggttttcacagcagcctctcccaacacaggtccaaaggactaggagaaaaaatggtttcatgggcagggcccatggccttgctgttttgtgcagtctcaggacttggtgccctgcatcccagtcggggctaaaaggggccaagtacagctcaggccattgcttcagagggtgcaagccccaagccttggtggcttacacgtggtgctgggcctgctggtgaacagaagtcaagaacagaggtttgggagcctccagctagatttgagaggctgtatggaaatgcctggatgtccaggcagaggtgtgctgcaggggtgaagccttcatagggaacctctgctaggacagtgcagaagggaaatgtggagtgggagcccccacagagagttcccactggggcactgcccctagtggagctgtgagaagagggccatcgccctccagaacccagagtgttagatccaccgagagcttgcaccatgtgcctggaaaagccacagatactccacaccagcccgtgaaagcagccaggagtggggctgtaccctgcaaagccagaggggcagagctgcccaagaccatgggaacccacctcttgcatcagcatgacctggatttgagacatggagtaaaagatctttttggagctttaagatttgactgccccactggatttaggacttgcacggagcctgcagccccttcattttggccaatttcttccatttagaatggatgtatttacccaatccctggatcccactgtatctatgaaataactaaacttgcttttgattttacaggcccataggtgggagggacttgccttgtctcagatgagactttattttgttgttgatttttttttttttttggagacagaatctcactctgtcacccaggctgggatggagtggtgcaatcttggctcactgcaacctctgcttcccaggttcaaccaattcttgtgcctcagcctcccgagtagttgagactacaggcatgtgccaccatgcctgcctaatttttgtatttttagtatagacagggttttattattttgggaaagctggtcttgaactcctgacctcagctgatctgcctgccttggcctcccaaagtgctgagataacaggtgtgagccaccatgcccggcctcagatgagactttggactgtggacttttgagttaatagtgaaatgagttgagactttgggggactgttgggaaggtatgattggttttgaaatgtgaggacatgagatttgggagcgaccaaagtggaatgatatggtttggctgtgtccccacccaaatctcatcttgaattatagctcccataatccccatgggttgtgggagggagccggtgggaggtaattgaatcatgggggtgggtttttcccatgctattctcatgatagtgaataagtctcacaagatctgatgatcttacaaacggcagttcccctgcacacactttcttgcctgtcgccatgtaagccatgccttcactcctgttttgccttccaccatgattgggaggcctcccaagccaggtggaactgtgagcccactaaacccctttttctttataaatgacccagtcttgggtatgtcttttttttttttttttttttgagacagtcttgctctgtcacccaggctgcagtgcagtggtgcaatcttggctcactgcaacctctgcctccccagttcaagcaattctcctgcctcagcctcctgagtagctgggattacaggcatgtaccaccacacctggctaatttttatatttttagtagagatggggattcacc[138 bp omitted]acagaagggatattcaaatgtgatacctaaagtgataaatcattaaggaaaagatcagtcagaaggttctgaatggcagcaacaccataaacaaaatctaaagagaaccaatatgctgggaaaatatatttgtaacatatacataccacacagtggtcaatatacttaatatacaaacagatcttgcaaaccaattttaaaaaggtaagcacactaatataaaaatggaatacccaacagtcattaaaagcaataccgttgaaataaaattcaatgttttac[135 bp omitted]accccatctctactaaaaatacaaaaattagccaggcatggtggcacatgcttgtaatcccagctacttgggaggatgaggcaggagaattgctttaacccgggaggcggaggttgcagtgagccaagattgcaccatcacactccagcctggatgacaagagcaaaactccgccttaaaaaaaaaaaaaaaaaaagacagtgaaaaggtagccctcagagtggaaaatgatatttacaaacataaacagtagtccttccttatccgcaggggatacctccaagaacccagtggatatctgaaacctcagatagtacaaaccctataaatactgttttgttttgttttgttttggacggagtctggctctgtcacccagactggagtgcaatggcatgatcctggctcactgcaacctccccctcctgggttcaagtgattctcctgcctcagcctctcaagtagctagggttacaggtgcccaccaccatgcccagataatttttgtattttttagtagagacagggtttcaccatgtt[136 bp omitted]aagtgattaacgaatgggtaacatactcctatacagcacagatacactggacgtagggataattcatgtcctgagtgggatggtgtgagattttatcatgctactcagaacgatgtacaatttaaaacttactaattgtttatctctggaattttccattgaatatcttcacgctatggttgaccacagataactaaaaccacagaaagtgaaaccacaggtaaaggagttgtactggatccaacaaagttcttggatccggaatatataaagatcatctacaaatcaaaattactgggcagtttctactaaagctaaatctacacataccctgtggctcaacccttggtatacatgtggtccttgacttaagatggtctgacttatgatttttttttttttaaccagagtctcactctgtcacccaggctggagtgcagtggtgcgatctcggctcactgcaacctccgcctcccgggttcaagcgattctcctgcctcagcctcctgagtagctgggattacaggcactcaccatcacacctggctaatttttgtctttttagtagagatggggtttcaccacattggccaggctggtctcaaactcctgacctcaaatgatccgcctgcctcatcctcccaaaatgctgggattacaggtgtgagtcagccaccatgcctggcttttttttctttctttttttcttttttttttttttttttgagatagagtctctctctgtcgcccaggctgcggagtgcagtggcatgatctcggctcactgcaacctcggcctcctgggttgaagtgattcttgtgtctcagccttctgagtagctgggataacaggcacgcatcactgtgtctagctaatttttgtactgttatttagtagagacgaggtttcatcatgttgaccaggctggtcttgaactcctggcatcaagcaatctgcccacactagcctcccaaagtgttgggattacaggtgtgatgtgcccgatgactaacaatttattgactttacaataatgtgaaagtgatacattttatttctttttttcatttgtctttttttttcttcagtaaagatgggctctcactatgttgaccagcctggtcttgaactcctggcctcaagcaatcctcccatctcagcctctcaatgtgctgggattacaggcatgagccactgcaccaagccaaaagtgatacactttcaatagaaatcatattccatgcacccatacagccattctgtttttcactttcaattcagtattcaataaattacatgagatattcaacactcttgtataaaatacaaggctttgtgttagatgagtttgcccaactgtaggctaatgtaaatgttctgaccactttaaggtaaagta[144 bp omitted]gaaaccccatccatactaaaaatacaaaaattagccgaagccaggcacggtggctcgcctaatcgcgacactttgggaggccaaggcaggtggatgacctgaggtcaggagttcaagatcagcctcgccaacatggtgaaaccccatctccacaaaacatacaaatattagtcaggcgtggtggtgatgtctgtaatcccagctactcgggaggctgaggcaggagaattgcttgaacccaggaagcggaggctgcagtgagctgagatcacgccactgcactccaccctgggtgacagagtgagactccgcctcaaaaaaaaaaaaaaaattagccaagcatgccaagcgtggtggcacatgcctatagtcccagctactggggaggctgaggcagtagaattgcttgaacttgggaggcagaggttacagtgagcagagatcatgccactgcattccagcctgagtgacagagcaacactccgtctcaaaaaaaaaaaacaaaaaacaaaagtcaatatcctcagcttgggtgacagagcgagactgtctcaaaaaaaaaagtcaatatcctggggcaaaaggatatgaaactgttctagatccaaaaagatttttgataaataaaaaataataaataaataataaaaaagaaaacaaaacaaaaagaaaagaaggaaaaagaaaacacaaacacacacacaaaagagactaaatagacataatggccaaacactaagctcaattgtatcctggttcctaaaaacagccgtaggctgggcaccgtggctcacacctataattacagcactttgagtcaccgagaggggaagatcatttgagcccaggagattgagaccagcctgggcaacatggtgagatcctatctctaccaaaaaaagaaagaaaaaagaaaaaaaaagctgtaaaaattattcctcgggtaattggagacatctgaacacagctgaatatttaataatgatataaagttactgcatattggccggg[177 bp omitted]gctgaggcag[137 bp omitted]cgtgacaaaggttttgtaaaagaggaagtctcaaagtatagcctagagaaccctgacattctgcaaaatcaaaacgatttttggactttttgcccattttcactcgcattccccaaaaacatttgggggagaggggcgcggttctaaaagtttcatgac[132 bp omitted]gcaacctctacctcctgggtgttcaagtgattctcatgcttcagcctcctgagtagctgggattacaggagcgtgccaccatgcccggttaatttttgtatttttagtagggacggggtttcatcatgttggccaggctgatctcaaactcctgacctcgggtgatccgcacacctcggcttcccaaagtgccaggattacaggcgtgagccaccgcgcccggcctgtgcttgtgtattgttatattttgtactattatttcaatgtagattttaaaaaattcaaaataagaaattgtgggtggggaacatataacatcttgacctaaagcagccttcattgtccctgaaacttgtcgagtgatttccgcaacagcccagcctgcctaaccccaaattctttcaacaaattcattcttcccttccatgatgcatcatgtctgtgacacatccccagagcttttctttcatctgttgcctgcagcagctaaacctgaaactacccccatcaaagaaacataacccagaaggaatcctgtaaagcattcagcttgctggccttggagttcccacggcctacactgccccctggtggcaagtaagctctcagcttcttttccatttggttcccaagttctttcccttcattactcaaaactatagtaaacacctcttatctgcctgggatacatttcaagacccggagtggatgcctaaaaccgcagatagtacagaaccctacacactatgctttttcctatacatacgcacctatgatagagtttaatttataaattaggcacattaataaatcaataataactaataataaaatagaacaattacagcaaggcatgatggtgcacgtctgtaggcccagctacttgggaggctgaggcgggaggatcaccttagccagggttcaataccagcctggacaacatagcgagacccccacccaaaaaaaaaaaaaaaagaataggtcggacacagcagctcaaacctgtaatcttagcactttgggaggtcaaggcaggtggatcacttgaggtcaggagttcgagaccagcctggccaacatggtgaaaccccatcgctactaaaaatcttttaaaaatcaattagctgggtgtggtggcactcgcctgtaaatccagctactgctactcgggaggctgaggcaagagaatcgcttgaacccaggaggcagaggttgcagtaaaccaagattgtgccactgtacgccagcctgggcaacagagtgagactccatctcaaaagaaaaaaagatgaagtgatggatggttagagatgtacactgtaaaaaaaaattttaagcctggtgcagtggctcactctaatcccagcactttgggaggccaaggagggaggattgcctgagcccaggaggtcgaggccagcctgggcaatgtggcaaaactctgtctttacaaaaaacacaaaaactagccaggagtggtggtgcacacctgtagttccagctatttggaagcctgaggcaggaggatcgcttgagccaggaggttgaggctgcagtgagctatgattgcaccactgcactccagcctggatgacaaagtgagaccctgtctcaaaaaaaaaaaaaaattttttttcagcttttctctatgcttgaaatttttcataataaaatgttggaagaaaaattactcgtttcacaatgttaaaaggaggaagtattgaaacccacacttgagccacataagaatcaatggtggagcttttaaaacatgccaattccttgtgtccacccagaacaattaaatcagactctctgattctaagggacctgggggatcagtgttttcagcagtacttctctaagccagcatatttaacagcaaacctaactttctgattcggccaccctgtggcagctaagatgttcacttctcaatcagtttattaaaaaaagaaaacttgggccaggtgcggtggctcactcctgtaatccctgcattttgggaggctgaggcacgcagatcacttgaggccaggtgctcacgaccagcctggcagtatggcgaaaccccatctctaataaaaacataaaatttagccagatgtggtggtgcgcacctgtaatcccagctactggagaggctgaggcagaaggatcaccgaaaggcggaggttgcagtgagccgagactgcgccactgcactctagcctgggtgacagagtgaggctctgtctcagaaaaaaaagaattactcctgttttggcgatccactgccttgtagcgtcatcatgtattaaacagtcccctgctgtgtactttgtcccctgccctacacccctgctgtcttttgtgcacatgagcaagggtgtctctgggcttcacacctagaaggggaacctctgggttggagatcctgaaggcagccagctaatccttgaaacagcctcaagaggaaggtgctgtgataaaccctgtgttttagcgcagggaactgaggctcccagagggaggcagagattgcagtgagccaagattgtgccactgcactccaacctgggggacagagtgagactctgtctctaaaaaaaaaaaaaagaaagaaagaaaactcattctacaatgaaaccacttaaatttgtcccatcttttatgtaagatgaacaaccagttcaagaaactgggagtttctatgaaaattaaacatttgtcgactcagtgacccagaaaatccagtccttagaattcatgacaatgttccctaagatattagcagaagaatcttcatagcagcattattcgtggtagccaaaaactgaataatcagaaggaaaatagggtgtagtggctcatgcctgtaattcactttgtactttgggaggctgaggcaaggaggatcgcttgagcctaggagccaccacaacctgcccattttgtagggcaaaaattatggccagtggaccaaatttggcctgccatcagtttttgtaaggcctgtaagctaagaatcattttaactttttttcacattgaaaactatcaaagtaacatgtaaaaactagatggggctcacacctgtaatcccaacactttgggaggccgaggcaggagggttgcttgaggcctggagtttgagaccaatctgagcaacacagcaagactcagtctctacaaaaaattgtttaaaaattagctgggcatggtggcacatgcccatagtcccagctactcaggaggctgcggtaggaggatcacttgagcccaggagttggaggctgcaatgagctatgctcacgccagtgcataccagcttgggcaatagaacaagagcctgtctcaaacaaatttaaaaaaaaacctatatgaaatccaaattttattttttattttatttatttattttttttgaaatggagttttgctcttgtcactcatgctggagtgcaatggcaccatctgggctcactgcaacctccacctcccgggggaggttcaagcgattcccctgcctcagcctcctgagtagctgggaatacaggcacaccccaccacgcccagcttattttgtatttttagtagagatggggtttcaccatgttggtcaggctggtctcgaactcctgacctcaggtgatctacccacctcagcttcccaaagtgctgggattacaggcatgagcctgacctaaaatccaaatgtagaggccacaaataaagtcttattagaacacagccatgcctattcatttatgcagtgtctgtggctgctttcatgccacaataagagagctgagtagctgtcacagagaccctactacctgtaaaaactgaaaatatttactatctggtccttcacagaaaaaggtggccaactgctgctctatagcaataagaaggaaagaactccaagtataaaccaacatcatgtagagtggaaaaaaggccagacacaaaagagtacactgtataagtcctgtttataatgtcagaacaggcaaaaccggcctgtggttaaatgcatcagaagaatggtgccttaggagggcggtcattggccagaaagggaggcaaggaagacttctggggtgatgggcaagttctgtatcgggatctgggtaagtactcatacacatgtataatatgtggactcctttcattccatgaatgttaacaactcggttttgtttgtttgtttgtttgttgagatggaatctcgctttgtcacccaggctggagtgcagtggtgcgatcttggctcactgcaacctctgcctcccggattcaagcaattctcctcctgcctcctcagcctcctgagtagctgggattacaggtgcctcaccaccataccgcttaatttttgtatttttagtagagacagggtttcaccatgttggccaggctgatctcgaacttctgacctcaagtgatccgcccacctcagcctctcaacgtactggaattacaggcatgagccaccacacccaggctaacaattcatttttttaaagtagaaggaaaaataaaggagagaaaaatggacccccatctccaaaatctcagacaagccagccatggtggctcacgcctataatcccagcactttggggaggtcaaggtgtgcagatcacctgaggtcaggagtttgagaccagcctggccaacatggtgaaaccctatctctactaaaaatacaaaaattagccagacatggtggcacatgcctggaatcccagctatttgggaggctgagacagcagaatcgcttgcgctcaggaggcagaggctgcagtgaactgagagcttgccattgcactccagcctgggtgacagagcaagactgtctcaaaaaaataaataaaaatgtgcctgggcgcagtggctcatgcctgtaatcccaacactttgggaggccagggcgcgcggatcacctgagatagggagttggagaccagcctgaccaatacggagaaaccccgtctctactaaaaatacaaaattagctaggcatggtggcgcatgcctgtaatcccagctactcgggaggctgaggttgcgctaagctgagatagcgccattgcactccagcctgcgcaacaagagcaaaactccatctcaaataaataaataaataaataaaacaaaaaaatttgctgggcttggtggcgcacgcctgtaatccctgctatttgggaggctgaaacaagagaatcacttgaacccgggaggtggaggttgcagtaaaccaagatcgcaccactgcactctagcttgggcaacaaagtgagaccctgtctcaaattaaaaaaaaaaaaaaaaaaaagttgcctaaggctgaggggggaaaagggaaggataggggtgatggctaaggggtgtggggtctttttggagtaatggaaacattttccaattaatggtagtaatggatgtacaactctgaatatactaaaagtcattgaattgtgcactcgaaatagataaattatatggtatgtgggttatatcaataaagctattaagcctgggcaacatagtgagattacagctcaacaaaaaattaaaaaattagccaggtatggtggcaggtgcttgtagtcccagctacttaggaggctgaggcatgaggatcacctgagcccagaaggtcaaggctgcagtaagctatgatcccaccattgcactccagcctgggtgacagagcaagaccttttctcaaaaacaaacaaacaaacaacaacaacaaaaaagggtgggtgcagtggctcatgcctgtaatcccagcactttcagaagccctgtaatcctagcactttaggaggccaaggtaggaggatcacttgtgcccagtagttcaagaccagcctgggcaacataacaaaaccctgtctctacaagaacatacacaaatcagccaggcgtgctggtgcatgcctgtggtcccagctaccagggaggctaaggtgggaggatcacctgagcctgggaggtcaaggctgactgcactccagcctaggtgacagagacccagtctcaaataaaaaaaaaaaagaaagaaagaaagaaagaaaaaaaaaaaacactgaagctaaatctaccatagctaaacccttcgttcatttcaagacatgtttgttagcacctattatgtacaatgtacatacatgtacaatgcatttttgcctgcttccagagaaaggcttgaaataaagcttctgtaaccattgtagctgaactctcttcccacacacagccctcatttcctctaaacactctgactcaaatgaactgtccctatttggcaaaactctctaacctggaggctgtcttctgtcacctgacattctgtccccaaagtcagccaaactttattatacatctttagcaattgatcagaagaatgccctgccagctgtttccctctctctgagggcaactcccctggccctccctccttcggcctggttgcaattctggccggaaacccgctggtgcctgtggcaaataaagtgaggaaggcaggaacctttagacttcccagtgtgaggcaacggcagggctaggactagggtgaggctgttggtgcaagatttaaggaggcgctcactcacaggtgcggaccctgcacttacaggaccctgagagcgagtgcctccttaaatgttgcactccagggtcctcaccgtccttttcctagtcctgggctccgggttctaagcacccagatgctccttcctcaaacggaggtttccgcaagacaggactgggtctctttccttctcagccctgccctcagaattccagcccctaatcaacttttatggagatgcatgccaggccaaagggctgcccctaagctttaggaaggaaactccttaaatgctgttgacttaggagttccgccagtgccccacctgcccagagcctcttgccccagtgccccacctgggtttatggtgcccccctcccagaaatatgagctcaggggtcagaaacccaggtcctgaggtccctcctccccaaggactcaggatcccaggcccccagtcccctcttcccttaagtttaagaagtccaggccaccaccctcttggggacccagcacccaactcacgaagcgcccgaagcggatggagtctccatcctcaatgtgtaagtcagcctgggccccactaaggcgggagatgacagactggcagccagggaggagggaacggagcagccccgagcctgtaatgtggtccgcgtggcagtgggtattcactgggagagagaggagggacaggtccggagggtacagaaaggacctgggagtcccagcccagatccttctccctcagactcaggagttctgggccccagcttcccattccactgacgctgcagcccagccccgctgggatccatgagtttggtccccggactgaccagcatagagcagccgcagccccagctccttgatcagctgggcatcccgaggcgctgtttccaggactgggtcgatcagaacggcctcccgggactctctgtcacccagcaggtacgtgaaggtgcagctcacaggctcgaacatctgggaacgggggacccaggtgagggcgcagaaccggacttccacccactggaggccaagtagtccagactgaccctatcctcttcctaagatccagaagcagaaaccccagcccactctttccccgggagtcgggagtccggagccccactaccttcccctatcagaacaaaagagttccaacttcctaacatcccaaaatcagggtccccagcacgttctttcatagaggacccaggggtctggccccaagcccagaggcccccagaccactcacctttaaaggacccaagagtccagccctaaacctccaccccgctttccgcaagatgcaggcgtgggtccccccggatctctccctattaagagaccccggagttccgtccttgctgccgcctagtgcccagcagtcccctcctaggtccagccacccgcacctgccgcaggaggatgggggctccagacccgccgcgctggctcagctgccgccgggcgaccctcagtacagcctccgccatcgcgcccactgcggggtcaggaatgagcggaggccgagcgcctgcaggagccgggcgctacggcactgaccccgggaagggcggggcgggggcggagcacgccttaaaggggccacggacgcctggggcagagggcgggggaccgccgagcgggactggggcgagggcgagaccgaggaaagccagagtgcaatgcctggacgctttgagacccagaaaaaacagagaacagggagacactcaaagtgcgagggacagacgctcagagacacacagacatactcatgtaggaacagagatagggagagaagtagaaacccagggagaggccccagtacactcatagcctcggggccgttttttttcctttttcttttgttttattttgagacagagtctcgctctgtcacgcaggcttgagtgcagtgactcgatctcagcttactacagccttaaactcccgggttcaagcgatcctccaacctcagcctcccgagtagctgggactatggcacgttgccaccacacccgacattttatatatatatatttatatctatatatatatttatatacatatatatatatacacacacacacacacatacatgtatataaaatttgttttttgcagagacggagttctcactatgttgcccaggctgatctcgaactcctgagctcaagcgttcctcccaccttgtcctcccaaagtgctgggattacagacgtgagccaccgcgtcccgtggggccgttttctagcaggtggtaggatagtcatggttagaaaaagatgttcggttccgggaggcagaggttgcagtgagtagagatgacgccactgcactccagcctgggcgacagagggagactctgtctcaaaaaaaaaagatattcgttcggttccaggtcattaatatcttgagggacttttgagtgggtgcctggttaccagaacaacacttgatcccattaaagttcatccagaaattgcataagcattttatcaggaatgtttctctctttccaggaagaaatcttaaaaaaaaaaaaaaagataattttgcattatctcttgaataatcagattggggattattcatcttctgttggggtgtgaacctctgaaaagagcttgtgttcatttacaccaaggacctggggctgaaaaactgtagtctcaagtcatgagctgtcagaaagtctgctctttgtaatcgtagcagtagtgagaataggacatcccactctcatctggaggatctatgtcactttgtgacatcagagcagccttgatttccagcctaggggcagagcttttttttttttttttaattgttagaattttttttgtagaaacaggggtcttgctatgttgcctaggctggtctccagctcctggcctcaaatggtcctcccacctgggcctcccaaaatgctgggattacaggtatgaaccactgagttatcctgtcccacagcttctgaggaggggtttcctgcaacaacatttatcttaattctggagtttccagggaatggtccctggagctattttcagagcagcccctgtgtgaatgcctttacacagagaaggcctgcttttccttaagcctatcaaattgcttcattaaaattttatgtggccggctgggcgcggtggctcatgcctgtaatcccagcactttgggaggctgaggcgggcggatcacgaggtcaggagttcaagaccagcctgaccaacatggtgaaacaccatctctactaaaaatataaaaattagctgggtgtggtggtgcacacctgttatcccagctactcaggaggctgaggcaggagaattgcctgaactcgggaggtggaggttgcagtgagctgagatcgtgccactgcattccagcctgggtgatggagactccatctcaaaaaaaaaaaaaaaaaaaaaaaaaaagcatatggctgagctcatgcacaggcactttgagcactttgggaggcctaggtgggcagatcacttgaggtcaagagtttgagacagcctggccaacatggtaaaaccccatctctactgaaaaaaataaaataaaatacaaaaaaattatctgggcgtggtggggcacgcctgtagacccagctacttgggaagctgaggcatgagaatcatttgaacccaagaggcagaggttgcagagtttgcagtgatccaagattgcacctctgcaa[148 bp omitted]ggtgaaaccccgtctctactcaaaaaaaatacaaaaaattagccgggcatggtggcggatgcctgtagtcccagctactctcgaggctgaggcagaagaatggcgtgaacccgggaggcggagcttgcagtgagccgggatcgtgccactgcactccagcctggacgacagagcgagactccgtctcaaaaaaaaaaaaaattccaggcatgaggtctcatgcatgcctgactcaagctagacaaagctgaggacccagaggtgactcagtctggctggtaggcgagagaggtagggaaagcaggtctgagacacagggaggtgtagggatttggggaactcaggggagggaggagccagggaaaggaagaccctcaggcactccttactgagagggtcccccaaataagaacttctcgcccctggcaccctttcccgttgtttttgcagaatttctagaccatttatgtgtcctttgaagacacaccctaggcagggtttataggctcagctgtgagatgttctaagagttagacttggcttcacccttctcaggtgtaggaccttgggctgaaaacttatcttcttctgggttccagttttcttatctacaaaatgaggttgaaaatagttcaatagcctgacatagcacaggctctcaatgggaactgcccatcattattttgtcactatccttgactccttcctacccttgccacctccacccacttccaggccctgctgagttaaactctctctctttttttttttttttttttttgagatggagtcttgctctgttgcccaggctagagtgcggtggtgcaatctcagctcactgcaacctccgcctcctgggttccagagattcttctgccccagcctcccaagtagctgggattacaggtgcacaccaccacacccagctaatttttgtagttttagtaaagatggggtttcaccatgttggccaggctggtctggaactcctgaccccaagtaatccacctgcctcagcctcccaaagtgctgggattacagggccgagccaccgtgcccagccagatttaacctatcttaaccaggccacttttctgttatcacaccctctgccccattcaaggggcagcaaagcataaatgcaaattgcctggactgcagggccaggctgagggattcaaatcctggctctgatacttcctggctgggatgaccttcccctccacacttcattttcctcctctgtacaaggatgatagtagcacctcctcttaaaacattgctatggggattaaataaattaatgcacataaggacagtttccagtgtataataagtgctagcaattaatactgtaattaatatataacaataccctcactggtcttctggcttctactctgccttcttaaaatcatggttcttgaaaatagctgtggccctagaggttgggcgcggtggctcacacctgaaatcccagcaccatgggaggccgaagtgggcggatcacctgaggtcaggagtttgagaccagcctggccaacatggtgaaactccatctttaccaaaaatacaaaaaaaaaaaaaaaaattagccaggcgtggtgacgggcacctgtaatcccagctactcaggacgttgaagcaggagaatcacttgaacctgggaggtggaggttacagtgggctgatatctcgccactgcacaccagcttgggtgacagagcaagactccgtgcaaaaaaagaaagag[133 bp omitted]ctgggtgttgtggtgaacacctgtaatcccagctacttgggaggctgaagcaggagaatcgcttgaactcgggaggcagaggttgcagtgagccaagattgcgccactgcactccagcctgggggacacagcgagattccatctcaaaaaaaagagagagagagagaccgaagtgtcacttcaaactaatacaatgtgtggagctcatttagatcttaagtcaagcaaatcaagtgtaataaaaagatatttatgagatatgatgtttgacatttagcttcagaatcatttgggaagagtggatggggggtaaatcaaacaatactggtcatgagtgaataattattttaaaaactttttttttaaagatacggggtatcactctgttgcgcaggctggaatgcagtaacacaatcatagctcattgcagacatgaactcctgggtgagtccccactccctacccccgtgaaatagctgggactacaggctgccattaagccagactttttttttttttttttttttttttttaagatggggaggtgtctcactatgttgcctaggctgggatttttgtttgtttgggtttttggtttttttgtttttttgagacggagtctcactctgttgcccaggctggagtgcagtggcttgatcttggctcactgcaacctctgcctcccaggttcaagccatcctcccacctcagcctccggagtagctgagattacaagcgtgtgccaccatgcctgactaatttttgtatttttagtagagacgggttttcaccatg[138 bp omitted]cctctgcctcccagagtgctgggattacaggcatgagacagggagcccggcctaggcactttctagtctaaacactttccattgattatcatatttaatcctaaaaacgctccattttatagatgaggaaacaggcctagaaagagagctagaaagggtcacacggctagaaagtggcacagccgtattccaaaccagttacccaggcaatctggctccagagtccaaataaccccgccaaactcccagggatcgccagaccttgcgggttatcggactgagacccacccatgcagaggacttttatgggcatttcctggtcctttctgcaccaggcaggaaggtgcaccgccactgctcgggaagaatgctaagctgcatgccaccccaggcctggcaccaagagcatgggccagggcacctcgggaccacccaggcttccgagggggaaggtagatgggtgcgtggctgagaatcttgaatcacccaatagcgaggtgtgccaaggcgctgtgcaaataacgtgccttttattgggcactggctctctttgagcccggagtcccgcccccgccctctctcgaagaactggccagactttttgcaaacgccttgaagggtagaattagcagcgagctcttgaaactgcctctggagatggaactcagcggaattctcgaaaagaagagggacattaaaaagacgggtgcatgcactgatttccaagcgcagtttgtccatgttagtcttgtacatgcttgactccagtcagccaccgtaggccccgccaccggcggtgcactttctgtcgatacggtagcttcgcgcttgctcacgaacttgcctgcctggctggcgcacccagcccctccttccattccttcttccccctctctgcagcctctgccagcccgcactgcgcatgctttctgacgccccctttggtccagcgtgggaggaggggatggaaatgaggttgggctaagcagcttgcgcgcgctcccttgcctgccctcccccgacgccggacgcgcgccgggcggggcagctccgctggtccgagggcagtgcagcagcggcgacagcggctgcggccgtggccgtggcgggaggagccggaagccccgcccccggggaggggccgtcctgcaggtgagggcgcaggggttcgggcgcggatattggcttgcaggctgaatgccagaatcaccccgagggagatcggttgtggtccggacgcctagattctggagatgctggagggactgtgcattggtgccagagcctcgggagggtgcatcggtgcctgaatgtctgattccgaggggtgcattgaatcctttacgcttgggactctgagggaaaagtccattaggggtctctggaccgcgacgcatgccaggttccttccgtatcttcctccaggtcccccctctatcctccacggccccatccaagccagggatgaaatttaacggcaagaagggcgcagttgacgcggcgtcaatgaactgagactaagtcaaaagccgggtaaagctaggtcttcgacgtgaagccccgcccactgtgcccataggcccctcccctgggacggtgatgaaagacctgcccactccgctcgaaggcccccgccccctgggtctagtttcagaacaagactttttttgtacagccccgcccattccaggactgcagggtctggtggggaaggtcccgcccactctgcgcataggccccgccggctccgcgcttaagacggccgctgagttagttgtggagactccgcccactctgctgaaagactccaaccctgggtttagatagcgaagggactgcctctggcttgaatttgcatagccccgctcactgtgctcttaggctccgcctccccgctaagcctgcccccgccttagcatcccatacttgcagaccttgctcctaaacagtgtgatccctcattttaggccctccaaccctatccccatcagcctggtcatcaccggcgtcacccccgccccgcgccctgcccctaggttcctgtgccagcaagatgctggagcgaggcgcggagtccgcggccggggctaccgatcctagtcccactggcaaggaaccagtgaccaaagaaggtgagagtgccccgcctgtgagtagggagcattctccaggaacgggggccaaaataatcacattctgggggaatctcagggtgaaaatttgagggccctagggtgatgactatttgggatccccaaaactgccacattctgggaaatcctcccatttggctcagagagagcctcagtgaccatttgctaaggctcaggaaatgagccttacagaagggacgggtcagggatgacatgcgggatgtcagggtgatcactgggaagatactagaaacggataccttggtagctttgaggaagccttagtagctttggggatccaggaaagtaaccctttggagtccctcagaatgacgcctggggggaggggggagcagaaacatgcaatttggggagtctcaatgtgatgcttgaggtgcccaggtacacttggaggagccccacgaatatcaaagtcgtggcggagcctggcctaggcccagggcgttggctgcttcctggagcccaccagccctcctgtcccccagctccccaccagggcccaccgcagaagcccagccagtcagctccagggcccaccgcgtccgcgggctcgcctccccggcctcgccggcggcccccgccccagcgcccgcaccgctgccccgactgtgacaaggccttctcgtacccgtccaagctggccacgcaccgcttagcacacggaggcgcccgaccccacccatgcccagactgccccaaggccttctcctacccctccaagctggcagcccaccgcctcacgcacagcggcgcccgcccgcacccgtgcccacactgcccgaagtcctttggccaccgctccaagctggcggctcacctctggacccacgcacccacccgcccctacccgtgccccgactgccccaagtccttctgctacccttccaagctggcggcccaccgccacacgcaccacgccaccgacgcccgcccctatccttgcccgcattgccccaaggctttctcatttccctccaagctggccgcccatcgcctatgtcacgaccccccaaccgcgcccggcagccaggcgactgcctggcaccgatgctccagctgcggccaggcctttggccagagacgcttactgctccttcatcaacgcagccaccaccaggtggagcacaagggggagagagactgagccctcccttggctcactgtccccttctgccgccagccctagccagtaagaggtgggatttctaagaccgactgtatgagctcgcctcttccagatagctggcagagggcagggcaagggattggccatttatactgggctcgagctcagaagcccgaggaactctttgctcccctgctttggggagatctcaaaccatggacgtggagctgtggtttgacagcgctggctctgcttctccccacacacttacatggcaaaggtaaaaagtctgctactatcgtgggttgatgaggattgtgggcaaacaggctctcttgttaaaagtttaaactggtgtctccactttggccatatgacggtatctaagaaattgaaaatacatacatgcttgtctcaactcttccacttgtaggaatttattctataaactcatgaatgtgaaaaaaaagcatagtgttaagggtgttcactgcagtgcgactgttgtggccaaagactggaagcaactcaagtgcccaagaacaggggaccgactattgaattacagccatggaatggaataggtagccataggaaaaaaggaagcgctatatgtactgatgtggaaaaatctccgatacactaggtgataagagcaagaacaaagggtatataccactgaccatttaaagacattcaaaagcccaagcttcaggctgggtgtggtggttcacgcctataatgccagcactttggttagcttgaggccagttcaagagcagtctgggcaacatagcgagacaccatctctaccaaaaaaaaaaaaaaagctggctgtggtggcatgtaccttagtcccagctacttgggagactgaggaaggtggatcacttgagctggcaggtcaaggctgccatgagctgtgatggtgccactgccttccagtctgggtgacagagcgagaccccatctcaaaaagaaaaacaaaaaaagcccaagattcagacccatccctgacccacttcttacaagttgccaggccttggacaagctttgtcactcctctggattcagatgcctttgttgtaaaatgggtgggttataaggcatttgtaaggggcaagcaacacctcaggcaaagtcagttccccttatggagcctgtttctctcattataaaataaggatgaacaagctaacattggaatgttcttcattccacaaatactaagcacctcctgtgtgctggtccctgcatggggtgttggggacacagcattgaagacagaccttgtctagtgaggaaagtgaacactaattttaaaaagcagcagcagaccaggcagagtggctcaggcctgtaatcccagcactttgggaggctgaggcaggcggataacttgaggtcaggagttcaaaaccagcctggtcagcatggcgaaactccatctctactaaaaatacaaaaactagctggacatggtggcatgcacctgtaatcccagctacttgggaggctgaggtatgagaatcgcttggacgcgggagacgaggttgcagtgagccaaggttgcaccactgcactccagcctgggcgacagagagcctgcctcaaaaaaaaaaaaaaaagcagcagcagccaagtcattcattcatccatgtgtgtatgtatgtagagacagggtctatgttgcccaggctagtctgaacttctggactcccactttggcctcccaaagtgctaggattacaggcatgagccaccatgcccggccccaagtccatttagaagaacaagtaggagagccttggctccccaccccctcaacccagatacaagattacaaagctgtgcagtaatgaaattggtggtggtggcttgaaaacgggccagtggaagacaattgagagctcagaaacagacctgtgcttatgctgacatatgacaaactggacctgtagacctgggagtggcaacctttttctataaagggccaaagagtacagatgtcccctgacttaacaatggtttgatttcaggattctccaactttatgatgggttcatccggatgtagcatcattgtaagtcaaagggcattgggttttttttgttttgttttgttttgttttgttttttagacagggtcttgctctgttgtccaggctggagtgcagtggcacaatcgcagctcattgccctgaattcctgggcgcaagcgatcctcctacctcagcctcccaagtagctgggactacaggcaagcaccaccacacccggcttatttatttttgagatggagtcttgctttgttgtccaggctggaatgcagtggcatgatcgccgctcactgcaacctacctctgcctcctgggctcaagcttctcctacctcagcctcctgagtagctgggatttcaggtgtgcaccaccatgcccagctaatttttgtatttttagtagagatggggtttcaccatgttgaccaggctggtctaactcctgacctcaagtggtccacctgccttggcctcccaaagtgctggaattacagacgtgagtcactgcgcccagcccccagctaaattttttttgtaaatttttttgtagagatggggtctcactatgttgcccaggctggtctcaatctcctagcctcaagtgatcttcctgtcttggcctcccaatgtcctgggattccaggcgtgggccgccaagcccagctgcatctgttatatgtttaagttttgcaggccatacagtgtcttccacaactattccactctgccactgtagcaggaaagcagccacacacattacaatacataaatgaatgagcatggctgtgttccaataaacatttaccaaaacactaggtaggctggattttgcctatgggctatagtttgttgagccttgacatggatgagtggaggatggacagactaatcataaataaggctaagagacatggggaaaaattaagttgaatcccctggtatgtagaagaatgatcccccaaagatatccacatttgaatccccagaacctgtatgttagcttgcatgtagcaaaagggacattgcagatgtgattgagatgggtaagttatcctgattattcagataggcccaatataatcacaaaggtccttatatgggaaagaaggacgcagaagacagagagaggtgatcatgaaagcaaacattcgagtgatgaaaggccccaagtcaaggaattttgcctacaaagggcaaggaaataaattcctccttagagcctccagaaggattgcagccctgctgacacttgattttagcccaataaggctgattttggactactgacctccagaactataataaaattaacttgtgtagtttaaaaccactaagcttatggcaatttgttacagcaacaatgggaaactactgcagatccctacctcacaccatatgcaaaaacaagtttctgggagtttaagatctaaatctgaagagaagaactcaaaaatatttacatggaaataagaagaattatcttagtaactccagaagtagagacagtatccttaagagacaaaagaatgtaaatcatagatgaaaacatgggtaaatgtgaccataaatgaatgtaaagttatgactaggatggatgagatatagtattttaagagtgtgtacctggcatatcctattatacagtggaggttaggaaaggccttgttgaggatgtaatgtctgaactgagatctgaaagttgtggtggaaggagtgagagagtagaaagtgtccatagattggataaagaaaatttggtacatatacaccacggaatactatgcagccataaaatggaatgagatcacatcttttgcagggacatggatggagctggaagccattatcctcagcaaactaacgcaggaacagaaaatcaaacactgcatgttctcactta[131 bp omitted]tggcaaaacccccctctactaaaaaacaaaaattagctgggcgtggtggcaaacgcctgtaatcccagctactcgggaggctgaggcacaagaatcccttgaacccaggaggcagaggttgcagtgagccaagatcatgccactgcactccagcctgggcgacagagtgagactctgcctcagaaaaaaaaaaaagaacacatcaggggaacaacacacactggggcctgtcagggggtgggggtggggggctaggaagagcatcaggaagtatacctaatgcacgctggggttaatactcaggtgatgggatgatctgtgcagcaaaccaccatggcatgtatttacctatgaaacaaaactgcacatcctgcacatgtacccccgaacttaaaataaaagtaggagaaaagaaagtgtccagcctaagggctaggactgagcaggctgctgaactgcactctactcagtaaggcatttcggggaaggttttgggaggggtaagggttctactctgtcctcccaacccagcagtgctgcttgtatccacgtttatgcagagaactgtccggaagaatttctccaaagcaaccacaccagcagcaaaatttcaaagacacatactcatgtgagagggcgttgatctggtccaaccttacttttacagattggggaaatgaggccaggaaagatgagatttattggcaaccaaaccacagggcagtacctgagtctaggtggatcctaggtctcttgatagcctgacacccacccagctgttccttgaacacataatgctcgctcctgcctcggggcctttgcacttgcttttcctctacctggaagggctctctcagatactccttacttctcccaggtccctgcagaggggtaagtcctccaagaggccatccccaatcatcctatctataaactaccaggaccctgccattgctctgtcactcacaatgctctattttccttgctctcacagcatttcccactgtccaaggttgcattgcacgtgcaccatctctctccccctgtacaatgtcaggccaatgagatcggggactactgtttttttcatactgtcttcccagtgtcccccacatggtggctttggtaggcagagtaatggcctcccaaagatgttcacatcccagctgggcacagtggctcacgcctgtaatccagcactttgaatggctgaggcgagtgggtcacctgaagtcaggagttcgagacctgcctggccaacatggcgaaaccccgtctctactaaaaatacaaaaattagctgggcatgatggcaggcgcctggaatcccaggtactcgggtggctaaggcagagaattgcttgaacctgggaggcagaggttgcagtgagccaagaacacaccactgcactccagcctgcgtgatagagcaagactccgtctcaaaaacaaaaaaacagggagattatcccaaatgatctaggtaggcttaatgtaatcacaaagatctcttgttgcccaggctgaagtgcaatggcatgatctcagctcactgcaacctccgccgcccgggttcaagcgattctcctgcctcagcctcccacgtagctgggattacaggcatatgccaccacatccggctcattttgtatttttagtagagatggagtttct[139 bp omitted]cagaagagtcaaggtcagggtgatgggatgtgagaaggactcaacaggccattgcaggcctggaatatagaaggtgaatggaatgtgggtggcttctagaagctggaaaagacaagaaaacagattctcccctcaagcctccagaaggaacgcagccctgcctaccttgatttttagcccaaggatacccattttggacttcagacctccaaacctgtaagatcataaatttctattattttaagccactgagcttgtgataatttgttatagcagtagtacaaaactaacatggtgagttatcggtgggagtgtgaatgagcaaacgaatgagtgaacatgaagtctaaagccacccttagctgggcagtgtggctcaacacctgtaatcccagcactttaggaggccaaggcgggaagactgcttgaggccagaagttcgaggccagcctgggcaacatagtgagagcccatctctacaaaaaatagaaaatttatcaggtgtggtggtacatgcctatagtcccagctgctcaggaggctgaagcaggaggatcgcttgggcccaggagttcgaggctggagtgaacaatgattgcaccactgcacttcagcctgggcaacagagcaagaccctgtctctaataataataataataataataataataataataataataaaccaccctcatcttaaagatgcaaaaacaaaggtccagaaagagacaggagtgagactggtagcccttggttgatgaggcaaaagttgggaaagggcttggaatgtccaataaaaggttacccaaaggtcagatctcaaacctacctctgaccctggcctctgtcctgctcaaaccccctcccaaccttcccaccctcagattaaagtccaggcttctcagcctggagttcgcagaccttcaggccagccctgtccaaaagacctttctagactgatgcaaatgttctctgtactgcctaatacaatagccactgagcaattgaaatgcatggccagtgtgactatggaagtgaagtttacatttcatttcatttcattttaattaatttaaatagccacctgtacccagtggtgatcacactggacagcagagctgcaaggactgtgcctggctttctaaatctgcccccaaagcctctttgccaaaggcagcaatgctcttctgcctgcctcaggctgcttcccacctcctggcccatgctatggcctctgcctagagcaccatcccatcctctgccctgattccctcacaatcacctcaattcccacttaaatgtggtggagccttgaagggggtgcagggtttgggtaggttgcttaaaatgtcccttcctcccattctacctcctaaattaggtgatgtaaaaccacagtggtgacattcattatacagctacttctgaaaaccctggaggaaaggcactatccctggcctggggacgctgaggcttcaggagagagacaagcctcatgggtacccaggcctccagccacaaagggacagccaagatacaggtgtggctcagagggccagaaaaagttgaggggcagtgctgagggtcagattcccagttccctgcctcttgccaacacagggataaggggccaagcagaagagacaaagagttccttctctaccagatctctgacggaggtgcccagcattcttccccaggtcccagggagcctcttagagttttgggagactcttggatgagaaccaactcatctttattaaatgcatcgtgtgtgtgtgtgtgtgtgtgtgtgtgtgtgtgtgtgtatagcacatacttcaggcttgcggcaccaccccatagagctggtgaggaagtaacttctgcttctcattgcaactgtagatccatcggggacgaacgaatgccagggaggggttgtccatcagggcctgcagggtggggtggagtccatacgggaatgtgtcatcgaggggaggacggaggagatgcaaaggtgtgcccgggtctcccattctctgcctctttggtactcacctcctcaaagctgggatcccattcctgtgctgtgatcacaaactgaacccggtcactcatatagtcctcgagctccctggcgggagagaagaaaagaggtagaaggcacatcagggaatcagcactgacgtcctactccccagccactctcaatggctgtccccacactgtccccacctatgcgcctctaggttgcctctaggctccattctttcatgtatccatcttgccacagccacaatgaccagagctcccacagtggctaatcctcaggctgtccctttcagaagcaggggtaggggtagggatcctcgccatacagaagaggaaactgaggcaagcaatgcaccctgggctgccggtggtgggcaagctagcattcggattccatgacctgtgcccacctgctgggcatggcccttctccatcctcctgatggtcttctttcccacacccccacccctcccagcaggtccctgagcgttcccttggatccatcaccccttccccaccccagtccctggagactcacccattgaaggctgtgacgtatcggatgagtttccgccgctcgtccccagggaactccccgtaaagaaagaagtgcttgccctggaagaaatctgcaggagagaagggggctaaggtaagcatgaggccccaggagttcccaggcaccaaacaggagtgacgaggctgacccagcagctgaggagagggctgtccacatgtgggcagggattgatggcaggcagtggaccctgcccagcggcccatcagagcctcctggggaggtaggttggttggttggttggtttgctttaatggtagaagatacaatgcctattattgtgatttgtttctgaccgacaggctggagccacttacctctctctctctcttttttttttttaagacaaggactcactctgtcgcccaggctggagtgcagtggcgtgatcttgcctcactgcaacctctgcctcctgggctcaagtgattctcccatctcagcctccccagtagctgggactacaggtgcatgccaccaagccagactaatttttaaactttttgtagagagacggggtattgacatgttgctcaggctggtctcaaactcttgggctcaagcaatcctcccacctcagcctcctgagtagccaggactactgagtagcacaccaccacgctcggctaatttttaaaatgttttgtaaaggcgggggtcggggggggtctcactatgttgcccaggctggtcttgaactcttggactcaagcagtcctcccacctcggcctctcaaagtacggggtgagccaccacgcctggcctgcctggagccacttaatgagcttagtccaggctgaaaacgtcagtatctgccacttcttcacctttgctctcctttccaaccagtgcctttcttgttctgacctttggggtggctccttctttccattttaaggtgactctctaggccatcaatttgctgatgccactttaggggcttgggagaatcaaagcatcttcctgcccatcacccacgaggaactgggtggaaacggctcttctggaagccccagaaccacacctctgcacagcccgtgactgtctttcctctgctcccttcattctcgaagaagctctgcctccctgcccctcatcccacaactccctgcagagtttccccatttccttttgttcttattcttttacactggaaatgcaaacacacaatgtgtgcagacagcatccacgtccagagtgatggctgatgttaaagcagacactggtgtgcacccacccagggcctgacagagagcagtgcccctgtcacctggtgtgcccggcttcaccccagaccaacagaacggcacctgagcaagtgaagcactagcatgagggtggggccctcacccctgacgtgaaaaaaaggaggtcacacctggcacatggctgcgaggggagtggtcagaacaagaaatctggaggggagaaaaaggcaagtcacagagaggatgctgaaaggaaaggaacaagcctggcagaacctgaaggtgctgaggcagggagtgggttgaggaaggagaggggaggcaagacacgggggcagcagtgaccccagggctggccagggcaagtcccagctgagaactgagaagagaaaatgccacttcaggagggatggggggatttcccacctgggagctcagggactggcagatcaggaggctcctggtgttcctcactgtccgtgttctcatccgtggagcctgcatacgggtcttccccattctcctcctggccagggggcagtctgtgttccttctgctctgccaccctgggggtgccaagaggagtagagagtgagcatgcagagcagcctcccctacacccaaggccagggacaccccaacccccagccccagccctacctcctcagctcatcctctgtgtccccagaatcttccgccccattgtcctgtccttctgcaagtagaagctcagtcaatgcaaggctgccttgtctcctgggaagactggcagctctcccagtatggcacagacccaggcatctcatgcccccagcctcaactgccctccagatccagtcgtctgggcccccagcccctcctccctctgatccaggagtccaggccccagcccctcctccctcagacccaggagtccaggactcagcccttcctccctcagacacaggagtccagcccccagcccctcctccctcagacccagaagcccaggcccccagcccctcctccctcagacccaggagtccaggcccccagcccctcatccctcagacccaggagtccaggtccccaggctctcttccctcagactcaggagtccaggccccagcccctcctccctcagactcaggagcccaggccgcaggccctcctccctcagactcaggagcccaggccccagcccctcctccctcagagtctgacctgactgtaccccctcaatgtctatatcttcctggagcactggtgaggctgctttggtctcttcaggggttgggggcttctggggtgagctgggtccagctgcctgagtgggcttggttttggtctggggttgctaaggagggagagtgggtgggtgaggagggcaggaacagtgtgggtgtgttgggggggtacctgcaagaggcaagagtgggaagtttggggtgccacagcggactcatgtcatcctcccactacaccctcccccactggacagggggcatcagaccttctgaggaagcttgggggcttcatctccgctgccaccgctgtgagaggcctcatcctcctcactgctggaacctggccctgccatgaggtacctaggggacaaatcgggcctcagacaaacaggcccaagggaagtggggagggcgttcaggaggcaacagccattggcatttactaaaatactcactctagtgggcctcatggtcttgttcccagcccattctctcccagctcaggaaggccccagtgaacccagtcagtctggccacctgccctgcagacctgggtaccccctttcttcccctccctctttttttttttgagacagagtccattccatcgccaggctggagtgcagtggcctcatctcggctcactgcaatctctgcctccaggttcgagcgactcccctgcctcagcctccctagtagctgggattacaggtgcacaccaccatgccccgccaactttttgtattttagtagagacacggtttcaccatgttggccaggatggtctcgatctcctgacctcatgctctgcccccgtcagcctctgaaagtgctggaattacaggcgttagccaccactcctggccgcttttttttttttttagacaagatctcactctgtcacccaggatagagtgcagtggcgtgatcttggctcactgcaacctccacctcccagggttcgagcgagtctcctgcctcagcctccccagtaactgcgattacaggcatgtgccaccacgcctggctaattttgtgttttttgtgttgttttgttttttaagtacatacgaggtttcatcacgttggccaggatggtctcgaactcctgacctcgagtgatccacccacctcagcctcccaaagtgctgggattacaggcatgaaccacagtacccagaattcccctccctcttggggaagaaatgtctcaattcagaaaggaatgaaaaatcagaactttctcctttaagaatcaaaggcagtttctcattaggaaaatacccaccatttaaggggaaaatctcaaagcaaacacattttaaagactacaacactataatcatggttccttaagccactaacattccaggaaaaggattttcctagctctaacaacagtagcaggttcccgtccgggagggaggtggggggccagccgccccgtcgggggggaggtggggggccagccgccccatccgggagggaggtgggggggtcagcccccgcccggccagccgcccctccaggagggaggtggggggcgcctccgcccggccgccgccccgtccgggaggtggggggcgcctctgcccggccgccccttctgggaagtgaggagcccctctgcctggccaccaccccgtctgggaggtgtacccaacagctcattgagaacgggccatgatgacgatggcggttttgtggaatagaaaagggggaaaggtggggaaaagatagagaaatcagattgttgctgtgtctgtgtagaaagaagtagacatgggagacttcattttgttctgtactaagaaaaattcttctgccttgggatgctgttaatctatgaccttaccctcaaccctgtgctctctgaaacatgtgttgtgtccactcagggttaaatggattaagggcggtgcaagatgtgctttgttaaacagatgcttgaaggcagcatgctcattaagagtcatcaccactccctaatctcaagtacccagggacacaaacactgcggaaggccgcagggtcctctgcctaggaaagccagagacctttgttcacttgtttatctgctgaccttcccttcactattgtcctatgaccctgccaaatccccctctgtgagaaacacccaagaatgatcaaaaaaaaaaaaaaaaaaaacacaacagtagcaggttgacacttacatgggacttcctacatgccaggtagcacgtgacaaatactgagtcactgaatcctggggtaggtcctatttttggccccattttacaggtgaggagactaaggcacagagagattatttaatctgccctaagccacagggaaggtatgcagacacaaatgaatgtattagctccatttttctgagacatacatgttaagacccttctgcatttaatttggttgttttcaagctggtgaaatgctgtttaggtaagtcacactcataaaacggtgcctacaggagattcagaggatttaaaatgtagtagttcattaacagtcaatagcaggtttacttaactttttcttcaaagtgctctattcaaagattaaaaaaaaaactaaatttgtgcttattaggtatggagagtcatcctcttggggtcttccttctatagttgaatttttattttatttttattttttgagacagagtctcgctctgtccccaggctggagtgcagtggcatgatctcgactcacttcaaccccttcctcccaggttcaagggattctcctgcctcagcctctagagtagctggggctacaggtgtgcgccaccatgcccagctaatttttgtattttttggtacagatggggttttaccat[137 bp omitted]agactggagtgcagcggtgcaatcatggctcattgcagcctgaacctcctgggctcaagtgatcctaccacctcagcctcccaagtatctacgactacaggtatgtgccaccacacctggataatttttttcatgttttgtagggatggggtctcaccacgttgcctgcatcatatagttatttttttttagtttataaatgagtacaagccagaatttttaaaaatataaaatgctttgtgaattctttttgttaagaccagttgcaaatccaacactgtttgtctttttccctttctttcatgccctccttaagctctcccaggcagataataacccaaatctggttccttctgccccagatatagcaccagcccatcccctcttctgttcctgaggccccagcctactcaggagtccccacctgcagcctccccttgacacttcatccctcccaacagagcctgcccctgcccccatcaaaccttctgtgactcccctctgctcacaagaggaggcctctggagctggatgggcttcagaattttgaatctttcaggttttagagaggcaaatggctggcatacagattgttacataaactcccaggagggcctgggggagcaccccatgatcaaacccactaatatttctgcagttaagaccatgacacacttaaggggataaaaaaaaaaaagtccgcaaatagcctcacattagttcaggatgactgcagcgaaatgagtttgtgctgaacctagaaaagaactttcagcttctagagatgtttggattcctgaataacagatgagggttctgtgaagctgcatggagcccagtgtgtagcctgggctccggaagccccttctgacctgagcccacccacctcacagcctcgctatcccccaaggcaaataatttctcaaatacaccaggtacaactaacttctgaacacactcaggccatggagtacaatccagtctcccctccaattcatggacctcagatatgagctagcctttgctcagtccaaagccttctgtggttcctaatgccccagtcccatttttcctgccacttcttgcccctgtgtaagctcagcctcacctacaactccaggcagacaacaggctgacctgaccttgtctcctctgcccagcatgttctctgcctctgttcagcctgaaaaacctctcttggaccttgaagacccctcgctctctgcgggccaccctgtggggcttccactgcactgttacaacaattctgatccctcatcaaagtgagaagccttcaagggcagggctcaatgactggatcctcagccttgcacattccagcctggcaccaagcaggggcttctgggactcattttggtttttgggttttttttttcttgttgagatgggagtctcgctctgtcacccaggccagagtgcagtggcacgattttggcttccaggttcaagcgattctcctgcctcagccttccgagtaactgggattacaggcgtgcgccaccaagcccagctaatttttgtgtttttagtagagatggggtttcaccatgttggccaggctggtctcgaacttctgacctcaagtgatccacctgcctcagcctcccagagtgctgggattacaggcgtgagccactgcaccgggactcactttgaatgaatgaatatggaccctaacacttgttctcccacccctgagtttttgcacaaactgctcctccagccttttctgataagcaggcttcacagagccctctgtgacctcccaggcaggtcctccttccctcatctggagtaccccagcccctgccccgctcctctcagtagtctgctggctctgggctgggaccacctgtgttctccgctggcaggccccagtctgactcccctccagattcctggcattgcccagcacaggataaggagcagggttggcgtgtgaggccttacctctgggagggcagccgccgacgcatgcggtgacagtccagcacccactccttacgcacgatgcggcctcccaggcctaggacctggctgtacttgggggtgttggcaaaggcacagctggtggggggcagaagtgaagatgccagttaggtgtgatctgaggggcaaaggggaacgagacaggggagacagacagagagagagagagacagacagacagacagatcatgagattgaggtgggagaaacaaaaagaggttggagaccaagggagagatgcaaaaatcagagagaagacaaaggctacagaatgcagtgagaaagaaagcaagtgagagagagagaaagcatgcagcatagtggacacagagaaagcacaaggtggaggagacacagggagctgggggagaaactgcagcggcgcagggaggggggcgcaagcctacatgaggtgcgtgctgtcccgggtccagtctggccgatacttggccccaagctctagggccttatctcgcagctcggagcggaaggggttctggaagccactcagcaccactaccacaccctgaaggatcttccccagctcctctgggccagctcggggtcgtctgggctcggtgccttctcctcggggtttgcctgtcactgccccctgtgctcgggcagggactggggctgtggctggggtacgagttggagctggcactggagaagacaaagagtagattaggttagcaccactgggggtcaacccccagcccctcctccctcagacccagcagtccaggccccagaccctcctccctcagacccagcaatccaggccccagcccctcccccctcagacccaggggtccaggcccccagcccctcctccctcagacccaggagtccaggcccccagcccctcctccctcaggcccaggagtccaggcccccagcccctcctccctcagacccagggatccaggcccccaacccctcctctctcagacccaggggtccaggctcccagcccctcctccctcagacccaggggtttaggccctcagcccctcctccctcggattcaggaatccaggcccccagcccctcctccctcagacccaggggtccaggcccccagcccttcctccctcagattcaggacagcaggctccagccccgcttcccctaggacacaggagcacaggcccctgtggaaacaagggatctagttagctcacatttaggtctcttgggaacagatggcgacagctgggctggtggtttgctgggggtcttcttttcttcttggttcaaatccaacttcctcttccctttgggagactcctggggctgaggggatggggatggattgaggcctccagcttctctcctcctccaccccaccaaagtctgatgatttcaccttggaggtgctgcctatggccctggagactggagaggctgaggaggcagcactagaagcctggagggtagcagctgcatagctaggtcctgctgggtcgctggctgtgactatgaagggagaaagtggatccaggatgagagggctgagccccaagaccctttcactcctatctatgggacacagaatattgttgccaaaacccaccagtgatccaggagtcccagcctccagacctctcaaccctcaggacacaagaggccaggcccaccttcctccaccctgagacccaggagtccaggactccactaccctcctccctcagacccaggaatctgagccccagccccctctaccctcagacccacgagtctaggtctcaaccctactcactcaggacccacgttgtccgagctcacctggggatgtcttgttgatccggctgaagaagagagcccccggcctcagagagttggcgctctcatcctcctccttcacacggaactggccaagcttggtcactgtcaccttctaaggtcccgcaaggtcagtattataggtgggctgctggcaggtgggggtggagaggcagggagaaggccatggggagtgacaggtacagcttacctgggacggggcctctgcctcatctttgtctggggggctatgaaaccgtacaaaactcaagccaaagggggagtcctgggaaaggaggggtgggagtcagggagtctggcccaaggacagaggccagggcccaagacccttttcactcagggaaacctcttcctggctccttccctctcatgaacacccatgttgaaggaggggccctggcgatggtgatgacaattataggattaagctgttatgactgagccctaactctgagtctggctccaagcccttttcacgcattagctctttgggcaattggcagagtctactaggtgtcccagcgaattcactgccctatgcacaaactcctgcctgtggaatgggagggagtgctgcgtgccacttccagaacacagaagtgttccaggctctctcctctgccagctggatgcagagccagaaaataggagaagtctgggtccctgcacgacctcataaggagaagccagctgacaggctaaacactccccaggacagttacctgggcaagaagcacacctttagtgtgtggcatcatcacatactccagtctcactgttaccacagcttttagcatcccttaacctacagcaaccctgtaaggatcaggcaatggaggcccagagagcgtaagtcacttgcccaagatcacacagctaaaaagtggtatagccaggacgtgaactcagtaatcagacgccagatctcctgatgttaactactaggcccactctactaggccacctctctaacaagtcagttcccctcctccgattcccctctgagatgctgcagttcacccttcctagattcctccgggagatgaaacttctcattacaggaaagatcccaaacccatttcagggaacgcagggacccagcctccccataatcccatgggacaccagctgtctactcctcccagccctatgggactcaatattggcccttatttccctccttgcccaggaccaaggactctgcaccctggctcccaccctaggtaccttgctgtagggctggctgcaaacaattttgacccggtcccagcgcttctcggcggctgcccggaccagcttgtcaggcccaaacatgcgaacgcggttggggtttgagccactgcggctctcggaaggggacatgaaagatgaggtgaccagaaggacctgggtgggagaagccacagtgcatgagaaccagggcaggttggcttagatgagagcttctaggggctggggaagagggcacagggcccacacaggggactgggagtcactagaatgtagcttgggcctagatgtctccagaccctttgtttctaggccttgagtcagtcctgccctgacacaggccccagagggatctctttatcctccagatgtgagcgacccttatctaaattctcccatggagtcttccatatctggcaatacagcgggctacatgtcctaaggaactttcccggcagagaatattcagtaaactggcacaatattcaaacaccttttggaaatgcacaggtgagtcagcggaaaggcaaggggaattactagaggctggaaatgagaaaacagaatccagagagtcaggcgagctgcactaagtattaagtgattgtttctcagctcaaacctaccctctacaactcatctctgtgatctgggcccgcacttggcaaaccacctttctgcttccctagctgatcgtgaccaggctctgccaatagggggggcaagagagagagtttgcaaggctgcaggagggaggaaggaccagcttctcgtgcattgcagatcctgtgagcatcacccccagttaagcttctgctgctgcagtggttcctgcctgcagcagcagatgaatccagtttgcagtgtcccaatacctccagaaacagcctcattcagcccctctcagcagccggtgggggaggaagccctcctcaaacgatctgaatttcagctcctggagccccacctcccagtttccaaacatctacgtttcaataattcctgctcctttcttttgttcccccaaccctgggagtggtagctactccctgcggttgcttctccctcatatcttagtcttctagtaacacctagttactggttctttctatcaaattatctgttaaaataactggtgtggttttaatctccgggcaaggaccctgactgacccggcagcactcatgttggtagtttgtcatggtgctgatcccagatagcaaataacttgattttatttattattattatttttttaagagacagggtctttctctgtcacccaggctggagcacagtggtgcgatcatagctcactgcagcctcgacctctgggtctcaagtgattctcccaccttggcctctgagtagctgggtctagagatgcacgacaccacacctggctaattttttattttttgtagaggcatggtcttgctatgttgcccaggctggtcctgaactcctggcctcaaatgatcctctcacctcagcctcccaaagctatagaagtacaagtgtaagccaccacacccagctagaacttgatctttaagggttatgcacgtggtggtgaaagagaacaagagagaaaacctaggctccaagcaagggagagtggcatctcagagatcctcaccacactgcatagaactgaggactccccaaaggcaacgcccacactagttacatgaaggggaaataagcctgtggaaagagtccctgggaggcctgtctgtcttggccttagcttggggggacaccaaagaagaggtgaaaattcttctcgggagaactcctcacaagtctgttctctcaaggaattgagagt[140 bp omitted]atggtaaaaccccatctctactaaaaatacaaaatttaagccaggcatggtggcagacgcctgttgtcccagctactcgggaggctgaggcacgagaattgcttgaacccaggaggcggaggttgcagtgagctgagatcgcaccattgcacttaagcctggtggacaagaggccaggagttcaagaccagcctagccaacatggtgaaacaccgtctttactaaaaatacaaaaattagctggacatggtggtaggcacctataatcccagctactcgagaggctgaggcacaagaatcgcttgaacccaggagttggaggtgatggtgagccgagattgtgccactgcattccagcctgggtgacggagcaagactctgccaaaaaacaaaaaacgaaacaaaaagactgggca[133 bp omitted]catggtggcgcgtgcctgtagtcccagctactcgggaggctgaggcaggagaatcacttgaacccaggaggcggaggttgcagtgagccaagattgcgccactgcactccagcctggcaatagagcgagactccgtctcaaaaaaaaaaaaaaaaaaaaaaaagatgaatgcagccacttttggttgggtatattttgttactgacttagtctcttttctaactgacatgctgtgaaattataaaattggacaataaagccttttgctgagaaaaacagaacataactatagctctctttgtgcacagctgattatgcaaaggaaacaagaaagacaattatacagaagggaagttttcttcctgaccttgactatacttgtttataaaaggcctgatttggagctgacagggaagctgcatttatcatctggtgactaacatgggaaaaccctgtcctactaaatacaaaaaaaatagccatgcatggtggcacaggcctgtaatccgagctacttgggaggctaagatggagaatcgtttgtacctgggaggcggaggttgcagtgaaccgagattgcaccactgcactccagcctgggcaacaggagcaaaattccatctcaaaaaaaaaaaaaaaaaaaaaaaaaaaggaaggagggagggaaggaggggagggagaatggaaggaaggaaggctcctgtgactttgggtttgtgcctttgatgtttttgaagagtagaggtcagtgatttttgtcagatatcacttattgtacaaagtatctgatgtttccttgtgattaatttaggttgcacactttggccagaataccacagaagtgatgtgtaatatacagtttattttgtatattgacttctcatcttgtgaccttcacttactaaaccttgtagtttgtctagatctcttgggattttctgcatagacaatcatgccatctgtgaaaaaagatagttttcttttttctttttctcaccttgtcacactgactagtgcaaagttgggcatggtggtgcaagcctgtagtcccagctacttgaggggctgtggaaggaggatcacttgaacccgggaggacaaggctgcagtgagctgagatcgtgccactgcactccagcctgggtgacaaagtgagacctcgtttcaaaaaaaaaagagtaggccaggtacacacagcagctcacatgtgtaatcctagcactttgggaggccgcagcaggtggatcacctgacctcaggagttcaagaccagcctgggcaacacagtgaaaccctatttctacaaaaaatatttaaaaattagccgggcatgatggctcccactagctacttggggggctgaggcgggaggatcacttgagcccaggaggcagaggttgcagtgagctgagatcatgccactgtactccaacctgagcaacagagtgagacccccatctcaaataaataaataaataaataaataaatacatatatacataaataaataatatggttaaaaaaagagacagtttggtattggcataaagaaaactatacatatcaatggaacagagaagagagtacagaaataaacccatacatatggttaattaattctcaacaaggagtcaaaatgattcaatgagaaaaggcaagtctttttttttttttcaaagtattttcagccaggtgcagtggctcaggtctgtaatcccaatactttgggaggccaaggtgggaggatcactttaagctcaggagttcaagaccagccaggcaatgtagtgaaaccccatttctacaaaaaattttttaaaaaattagccgggtatggcggctcacacctatagtcccagctactcaggaggctgaggctggagaatcccttgagtctgggaagcggaggttgcagtgagccaagatcatgccactgcactccagcctggccaacagagtgagactctgtcttaaaataaataaaataaataaataagcattgtcaacaaacatataaaaaagatacagaaaagggccgggtgcggtggctcacacctgtaatcccagcactttgggaggctaaggtgggcagatcacaaggtcaggagatcgagaccatcctggctaacacagtgaaaccctgtctctactaaaaatacaaaaaattagccgggcatggtggcacgtgcctgtagtcccagctactccggaggctgaggcagaatggcgtgaacccgggaggtggagcttgcagtgagccgagatcgcgccactgcactccagcctgggcaacagagtgagactccatctcaaaaaaaaaaaaaaaaaaaaaaaagatacagaaaaaataaaccttatcccctgcttcacacaatacacaaaaattcacttgagatgaaacagagatctaaatgtaaaatctaaaaatagaaagcttctagaagaaaacataggagacaggcagaataacagctcctcaaagatgtttacatcctaatccctgaacctggaaatgtggcagaaggcactttgcagatgtgatgaacttgaagatgttgaaatgggggagatgcccctggattatccgggtaggccaagtgtcatcataagggtctttataagaaaggagggctgggtgtggtggctcatgcctgtaatcctagcactttgggaggctggggtgggtggatcacttgagcccaggagtttgagaccagcctgggcaacacagtgaaaccctctctctataaaaaataacaaaagctagccaggagtggtggtgtgcacctgtagccctggctacttgggaggctgaggtgggagaatcacttgaacctcagaggcagaagttgcagtgagctgagaacacgccactgtactccagcctgggcaacggaaatg[223 bp omitted]ggctgaggcagaagaatagcttgaacccgggaggcagaggttgcaaggagctgagatcgcgccagtgcactcactccagcctgggcgacagagcgagactccgtctcaaaaaaaaaaaaagaaaaagaaaaaaagaaggcaagagagtcagagttggagaagtaacaatggaagtggaagcaggcgttagagtgacaggagtgctggctttgatgaaggaagggtcacaagctgaggagggcagatggactctagaagctgaaataggcaaggaaatggattctcccctagagcctccagaaggaacagggctctgcctacacctagattttagcccagtgagagtgatttcagacttctgacctccagaacagtcgaataatacatttgtgtcattttaagccatgatccaaacttgctctcttccctgatgtgcagtttaccgccctgtgtctgccttctgtctcctccgtacactgggtgatcctccagagggcagcaatcaggtgtgactcacatctgccccatgtcttcccagccccagcccctgggggagacggtgatgcgagcatgaggggcagaggtcagtatgggatccatctcatagccctgcttacctcatagtcttgctccccagcgcctccagctgaactgcccaccagcacctccacgaaagctgagccatcattcccaatgtccacactgtgtatctgctcctccttctccaactgtgggcagagagagaggccactgtcagtgcctgctctgcctctgggctcactgtgggacctcaggatgaatctcctttggatcaccatgtccctgtaatgtcaattctgtgagggggcacaccagggttgaatggtgccatgtgtcccctccatgcagcacagggtatggcatggagcagaaactcacaaaatagtcactgaatgaatgcatacgcgcccacctcacacatacctgcttccctgacctctccagactccaccaggtcagcttatcacacactgccatagagctctccttgataagcacttgccagagttataactttattcaaatcatcatgcagacaaacagcacatgtcacccctcacccacaatcgcagaggactccaggaaacctccctgagggcaggggctttgtccgatcttgctcaccgctggttcctgggtttgaatcccagctgtgctgcacactagctgtatgaccataccagttaaccttttggagcctcagttttctcatctgtaaaatgggaatgaccaccatatctaggatcatgcacataaataatggccacagggcatggcgaagagtaggcaattatctgctgtcagtcaggaggtattattagtcagtgctagacaactatttgttgaaagaagaaaagagctacctataggagggctcatctcaaaggatctgccattcctgtctgacagatgaagatgcagaaagccgtgcgggccatgcgggcacgggaggcagttaggttgaggcaagtgtcctgccttccagtttggggctcttttattaggatcctagaatgacgcattattacaactctcaaaggtacctgggccaggtgcagtggctcaagcctgtaaatccagcactctgcgaggccaaggcagtggaccacttgaggccagcctggccaacatggcaaaaccccttctctactaaaaatataaaatatagccgggcatggtgacacatgcctgtagtcccagctcttcaagaggctgaggcacaagaatctcttgaacctaggaggcagaggtttcagtaagcagagatcatgccactgcactccagcctgggtgacagagcgagactctgtcacaaaaaaaaaaaaaaaaaaaaccaaggtacctagtccaccctacactgccctctcccacccctggtgatgacagatgctccaatctgctctgttgcctccctgtcagatcatctagacatcacctgcacactgctatcaacaggaacaccactgtatggaaggagggagcctggacttggggtgaggtaggcctgggctcaaatacagcaatgccatttccaacctgcacaaccttgggtgacgtattcaacgtctctgtgaggcagtttcctcacatgcaaaaagggaagatggtcattaacaaccctccctccttggccaggcgcagtggctcacgtctctataaccagcactttgggaggctggggtgggaggatcacttgaggctgggagttcaagaccagcctgggcaacatagccagaccttgtctctacaaaaattacaaaaattagcaaggcatggtggcacatacctgtggtcccagctactcaggaggctgaggaaggaggatcgcgtgagcctggggaggtcaaggctgcagtgagtcatgttcgcatcactgtactctgggcgacagagtgatgagaccttgtcttcaaaaaaaaacttaccctccctctgaaggaagttgagatgacacagaattaacaactataaccacaactgcggccaacatccgagtgcactgagcgctcctggtgtgccagactcctgctaataatacatgtatctactctcctgcaatggctctgccaggcagttgctataattatctccatcttacacatgagcaaacggaggcaggaagtggttatgtaacttcacagctggtgggtggcaaagccggaccggaacccaggcaggctggcaacagtccacgcgtgctcctccatcacaccactgacgtgctagaggaggaagatggtgctggaggaagggcctgcctaaggctgaggccggcagacctcctgctgactcccctgcctccaccgccattcccagccctgggccctgggcagtgtacagtgctgcctgggctcatgagatgtcccagtctgggccaggtgtggtggctcacacccgtaataccagcactttgggaggctgagacaggtgaatcgcttgaggtcaggagtttgagactagcctggccaacatggtgaaaccctgtctctactaaaaatatgaaaattaaaattagccgggcatggtggtgagcgcctgtaatcccagatactggggaggctgaggcaggagaatcacttgaacccgggaggcagaggttgcagtgagccgagattgtgccactgcactccagcttgggcgatggagtgagactctgtctcaaaaacaacaacaacaacaaaaacaacaataacaagaagtcccagtctgactgctccccaggccaggcttggtgactttccaccagccacaacggcctcccttctgtgccaagaacagtctggctccttcccacctcagggcctctgcacctgccaatccccctgcctagaccactcttccctcaaacatatccatagctgggtaaaagtttgccttctgtgcttcaggtgcccactcagatgtcacttcagaccataagtaacctacctcgccccctacctggtgccactctctatctccctacccgactttacttttcttcatgattactgcctggtgttacacagttacatcttttttgtttgtatttgtctagcatctgtctctcccgccagacttttaagctccacaagagcaaggacagtatcgtctgagttgttccctactgtgtccccaaggccaagaacagtgtctggtccttcccagctctgctgatttcctgctgtgtgatcctggagcaaatggtttcatttcaccccttgtgcctcagttttcgaacctatgaaatggggacaataacaacgtctatctcataaagttgttgagaacattcaaatccataccaagaatgagaaataacataccaagtgcctggaatactgcctggcaccgagcaaacactacataaatgtcagctgcgaatatcattaacacagcaggcctctactgcattcccaatggatgtacagacagacgcagaacaggcgcccagcaaccgtttgcagaagttactactcaagagttattaagcagtaactctggctctgtcctcccttaccaagtggccctgttgagccccttctctgctgcttgcctgggtgtcccatctgtcacaagaggatcatcatggctaacattttcggattctcaccatgtgccaggtgcttggtgtatgagtttcctgttactgttgtacaaattagcacaaactttgtggctaaaaacacaaatttggccaggcgcagtggctcacgcctgtaatcccagaactttgggagactgaggcaggcggatcacctgaggtagggagttcgagaccagcctgaccaaaatgcagaaactccgtctctactaaaaatacaaaattagccaggcgtggtggcgcatgcctgtaatcccagctactcaggaggctgaggcaggagaattgcttaaaccgggggggcggaggttgcagtgagccgagatcacaccactgcactccagcctgggcaagaagagcgaaactccgtctcaaaaaaacaaaaaaaaaacacacaaatttaatatcttacagatctggaggtcaaaagtctgaaactcggccttacagggctaaaatctagatgcggcagggctgcattccttccttccgggagcactagaggagaacgtgtctccttgcatcttcggcttctcgaggccacctgccttccttggctcacagtcccttcctcgtcttcaaagctgctgaaagcgctggcatcactccaggctctgcttgcatcttcacagctctggttccagctctcttgcctccctctttcccttataaggcctctgggggttacgtgaggcccaccagataatccagggcactctccccatctcaagatccttaatttaatcaaacccacagagctcctttggccattaaaatatttccaggttctggggatgaggacatgaacatcttttgagcaccactgttctgtccaccacacttggctaagcatgggccgggcatcactgaagcctcaaaaccactttaaatagaagggtctgttacgactccagtttcacagatggggaaactgaggctcagacaggtttaatcaatagcttacatggcacacaagctaataactagcagagtacttcggacgcaactgcctgactgcaaagcactgtccaataccaccactgttctcaactcctttctttccatccctgagtcaaactcaacatctttacctctcccacaatattcagcatagctcctaaatgtggtaggatggagatgcttgtattttaaatgaacaattcctactgcatatataactatttctactttaaacaggcactccctgacatttcttctttgtatataaaaaaagtcctggctaggagcactggctcacgcctgtaatcccagcaccgtgggaggtggaggcgggagaatcacttgaggccaggagttcgagaccagcctggccaacatagcaaaaccctgtctctaccaaaaataaaaaaagttagctgggtgtggtgacacgcacctcaataatcccagctactcaggaggctaaggcacaagaattacttgaacctgggaggtggaggttgcagtgagttgagacgagccactacaccccagcctgggtgataaagtgagactctgtctcaagagagaaaacaacaggctgggcacagtggctcacacctgtaatctcagcactttgggaggccaaggcaggcagatcacttgaggccaggagttcaagaccagcatgaccaatatggtgaaaccctgtctctactaaaaatataaaaattagccagacttggtggcgtgcacctgtaatcccagctacacaggaggctgaggccagagaatcacttgaacctgggaggcagaagttgcagcgaaccgaaatcatgccactgcactccagcctgggtgacagagtgagactccatctaaaaaaaaaaaaaagtggccaggcacggtggctcaggcctgtaatcctagcacttcgggaggcagaggttggcagatcacaaggtcaggagagttcaagaccaggctggccaagagggtgaaaccccgtctctagtaaaaatacaaaaattaaccaggcatggtggcaggcgcctgtaatcccagctactcgggaggctgaggcagagaattgcttgaacccaggaggcggaggt[131 bp omitted]tggggtggtggctcacgcctgtaatcccaacactttgggaggccaaggcaggtggatttcttgagcccaggagttcaagaccaacctgggcaacacggcgaaaccccgtctctactaaaaacagaaaaattagttgggcatggtggcatgcgcctgtagtcccagctactcaggagactgaggcacgagaatcacttgaacctgggaagcagaggttgcagtgagccgagattgcaccactgcattccagcctgggcaacagagcaagactcaatctcaaaaaaaaaaaaaaaaaaaggtttatatatacatggtaacaacccaataaatgtccatcagttgatgaatagataaacattgtacagtatatttatggaatatcatccagttatttaaaaaactgaagttgtgatatatgctacaacatggatgaacctcagaaacattatgcaaagtgtaacaaggttaagtgtaaaagaccacgtatacatttataagtccagaatacgcaaatccagagaagcagaaagtagatcagtggttgccaagggcaacattggggagagaataagaagtgactgtttaatggttatgtggtttctttttggagtgatgaaaatattctgaattagagaatggagatggttgaagaacattgtcaatatgctaaaaaaaaaaaaaaaaccctgaaatgtgcactttatttatttatttatttatgttttttgttgagacggagtctcactctgttgcccaggctggagtgcagtggtgcaatctcagctcactgcaaactctgccttccagttcaagtgattctcttgcctcagcctcccgaatagctgggactacaggcacgcaccaccacccccggctaatttttgtattttcagtagagatggggtttcaccatgttggccagcctagtctcgaatccctgacctcaagcaatccacccgccttggcctcccaaagtgctgggattacaggtgtgagctaccgcatctggctgaaatgtgcactttaaatggttaaaacagtaaattttatgtgaatttttctcaaaataagagatgagtgctcagtatgtatcagctgtgaggataagagcacaagatgactatcaccgatggcctgggttcgtgtgcatgcagctttctcagggagacacagttctgatatgaactgttcctgaaacaaacatggcacaggaaggcaaagttcctgagatatattgctaaaaaactgtttcacatccatgaaatgcaatcttttcttttttttttttttttgagacagagtcttgctctgtcacccaggctagagtacagtggcacgatctcggctctctgcaacctccgcctcccgggttcaaacaattctcctgcctcagcctcccaggtagctgggattacaggtgcccaccactgcacctggctaatttttatatttttagtagagacagggttccacca[139 bp omitted]ctgcgcacggcgtggctgacgcctgtaatcccaacactttgggaggccaaggcaggaggatcacttgaggtcaggaattcaagaccagcctggctaacatggggaaaccccatctctaccaaaaatacaaaaattagccaagcctggtggcatgtgcccgtaatcccagctactagggagattgaggcaggagaatcacttgaagctgggagggggaggttgcagtgagccacgatcgcactactacactccagcctgagtgacagagcgagattctgtctcaaagtaagtaagtaagtaagtaagtaaataaataaataaataaataaggtagaacttcatgcagtgtgcatctccaaaatacactgttacttgaaaaaaaacacacaagggaacagtgtatatactatgaattttttaaaaagggatggaggcggtaggtatatatgcttgtatgtgtacagaatgacccaggaagaccacccaaaaaaactgctaatggtggttgcatcaggagagaagaatgagggagcaggagttggggagggagcaggagttggggagggagcagggagggatggaaagggtgaggggagattttctttttagtgtatacccttttgcaccttttgaattttgcactatatgcatataatacccattcagaaagcaaatataataaaaccccaatggccaggtctttgtggctctgtctgtaatccctgtaatcccagctactcaggaagctgcctccaaaaagcttaaaaaaaaaaaaaaaaattagttgggtgtggtggtgtgcacctatagtcctagctactcaggaggccaagttgggggatcacctgagatcaacagttcaagaccagccttggcaacatagtgagactccgtttaaaaaagaaaatcaaatataaataaataaaaccataatagttatctcaatacaacagaatactatacagaaatgacaataggccaggtgcagtggctcatgtctgtaatcccaaggatttaagaagctgaggcaggaggaatgcttgagtccaggagttcaagaccagcctagacaacacagtgagacccccatctctgcaaaaaaaatacaaaaattagactggtgaactggcacatgcctgtagtcccaactactgaggaggctgaggtgggaggatcgcttgagcccgggaggtcgagcctgtagtgagctgagatggtgccactgcactccagcctgggcaacatagtgagaccctgtctcaaaaaaaaaaaaaaaagacaataggagtcgagcacagtggctcatgcctgtaatcccagcactttgggaggccaaggcaggtggatcactagaggtcaggagttcgagaccagcctgaccaacatggtgaaaacctgtctctactaaatacaaaaaattagccaggcgtggtggtgcatgcctgtaatcccagctacttgggaggctgaggcaagagaaccacttgaacctgggaggcggaggttgcagtgagctgagattgtgccattgcactccagccagaacaacaagacgaaactccgtctcagaaaaaaaaaaaatcacaataaatcatctacagctacactgaacgacatagatgaaatgaacaaacataacaagggaagccagataagaaaagtttataccacacgattccattttatatgcaattcaaaatcaggcaaaatgaatctatgctgttaacaatcaggacagtggttacccttgcaggggtactgacagaaagaacctgagggaactgctgggggctaggcatgttctgtgctgcatctgggtgtggagtacacagggctgcagtttgcaaagagtcactgagctgtactcttacttacaccttcacttcactctatgtatgttacacatcaaaaaacagtaaaaacaaatttaagacaccacagtggcgaactgagtgattagaaaaccaataacaatcaaaaatgaccataggccctattgctgatgaacatttcttctaaaaatgacacacctccagtgacacaccagagttatatctgggtcttgtccaagccacccctccagcccaggagtagttagcaaagaggttggcatttccctctgggagcaggtgatgaacagacaacagagcctgctgtggctactgcaaacaaccaggtgtgtggggctgtcataagcagatggctaagccccatgtggtaagatcgagattttgcataacaataattagaggagaaaatgcagggtagtagaagaacccacagatgtggccaggtgcagtggctcatgcctgtaatgccagcactttgggaggccaagacaggaggactgcttgagctcaggagtccgagaccaggctgggcaacatagtgagaccccatctctacgaaaaatttttaaaattagctgggcctggcggcacacgcctgtagtcccagctatctgggaggctgaggtgggaggattgcctgagcccaggaggttgaggctacagtgagccatgactttgcaactgcactccaacctgggcaagagagtgagaccctgtctcaaaacataacataacaacccagagataagcctactgccttggtggccagaaatgtctgcctttatcagttacgtcaaaagaatcaaaattagcatttgatgaatccagagtaaccccacaaattagtcattgccagatgcaatcagtcattccaaagggtctctgacgtggagtaagttaacaaaacaactgctgcaatgctgatctcccactcctgtgtgtggcccctgcagttgattgtcaacatggagccagcaggatcctgtgaaggcctaaggcagatcctgtccctcctctgctcggagccctccggtggctcctatctcacacctggagtaaaagctcaagtcctttcaatggctttccaggccttaagtggttttttaggggttcccagtcccaccctgttacctcatctcctacctctctccccctggctgactccaccccagccatactggcctccttgctgtcacaagccagcttcagagtcttttccctagatacatacatagctcatgttgctcaaatgtccccttttcagggaggccttcccggaccctactatttaaataaaaatccttgccactgctccagctccagctggggcactctcattccccttcattaagttcctccatagcactcatcatccaacatatgtttcactgactcatttgtcagtctttccctactaacgtgaaagctccacaagactgaatttcttttgtttttaagagacagcatctcattctgttgcccaggctggagcgcaatggtgcgatcatagctcactacagccttgatcttccaggctcaagtgatcctcccgcctcagcctctggagtagctgggaccacaggcataggccaccacgcttggcagatttttgtatttttagtagagatgaagtttccctgtgttgcccaagctggtctcgaactgccaggccttggcctcccaaagtgctgggattataggcgtgagcttactgcaccccactgagagtgaatattttttgtcttctgctgtgtactgctgtattaaaacagtgcttggcctacagaaggcacttaataaatacttgactaaataaatgagtgaatgaacaaataaatccatcatctactcccgagtctataggttctttctctgcactgacaacttccccacattctgtcttcagctccacatgtgatccccaactgcctcctggatgccacccctagaatgtcccaaagtcacatcaaacctggacatcccaactgaaacacatcacctccccaagctgctccctctggggtttaccatgttggtgaccgctgcaatactccctcagtctctcccaggccagagacaggttctgtctcttctgcctccagtcactctgtttccacagcaactggggtaacagaatgaaatgtgatttccctggagtcacttgatcataagagagcccagtggaatcatcacccactaagtaataaaaacacaaatccctccctctacacaaacacctacatgttgacagagcacttgtgcagacattatgtcaccgaattttcacaactccgggcttggatgtcattattcccaatggacacatgagaaaacaggttagagaaatgaaacaattttcttgaggtcaccgattaagaggaagagctgggggcttgaatctagatctcaagactaaaactgtcagcaatctgtatctatcacagtttaaaagactgaggtcaggtgcagtggctcatgcctgtaatcccaacattttgggaggccaaggtgggtggatcacttaaattagcatttggtgctcatttgccttgaactcctgaggtcaggagttcaagaccagcctagccaacatggcaaaactcggtctctattataaatacaaaaattagccaggcatgtaaattccaactactcagaaggctgaggcatgagaatcatttgaacctgggaagtggaggccattagttgacaggcactaaacactgacatcaattggggtggaccagatgatgttacagtaacaaaggagtccctaatctcagtggtttaaaacaaccaagttgtattaacttacactgtaataatgctgtgtaacaaatcatcctaaaactgagatcttttctttttttttttttttttttttttgagatacagtctcactctgtctcacaggccggagtgcagtgaaaccatcacagttcactgcagcttcaaccttatgggctcaatcaatcctccccgctcagcctccctggtagctgggactacaggcatacgccaccaagcccagctattttttataatttttcgtagagatagggtttccccatgttacccaggctggtctcaaactcctgggttcaagcgattcacccacctcgacctcccaacatgaaaactgagacttataccaacaagcattcttataagaatttgtgggatggctgctttggctgcagtttgggaggattcaggtctcttccatgagattccacagttttctgggattagcagtaacctggcaaatgttctcatggcatattatgggagcacaaaagccaagtgcatttaaggcccttgctgaagttagatgtgctgaaattccattaagtaaatcatatggtcaaactcatcaatggagcagggaaatatactccccctccagtgggagggagaggagtggatatttgctgaatgactgcccattcacaaaaggttaatttttccgtcaccctagcactatccacagagtgttctgctccttatagtcataaagcagcccccaggccaggaacaatggttcatgcctgtcatccgagcactttgggaggctgaagcaggaggaacgcttgagcccaggagtttgagaccagcctggcaacatggtggaaaccccatctctaaaaaaatacaaaaaaaactagccaggcatggtggtgcacacctgcagtcccagctactcaggaggctgaggtgggaggatcgcttgagcccaggaggtagaggctgcagtgagccaagccaagatcatgccactgcactacagcctgggaacagagtgagactctgtctcaacagataaataaaagattgactgtcaggcaaattgtataacttctttgggcctcagtttcctcatctgtaaaagtggggataacagagcctgcctcttggggttttttatgaggactcaatgagctaatccatgtgagtgaggtgtgtagagcagcgactgacaggtaacgttgaataatgccagctctcattattattattttattttttatattttgggggtctcactctggtgcccaggctggagtgcagtggcacaatctcagctcactgcagcctccatctcctgggctcaagcaattctctcacctcagactcgccagtagctgggattgcaggtgcacaccaccatactcagctaatctataaaattttggtagagatgacatcttactgtattgcccaggctggtctcaaactcctgggctcatgcaatactccagcttcggcctcccaaagtgatgggattacaggtgtgaaccaccatacctggctattattctttaaaaaaaattatttattttaataaaaatagagacagggtcttgatatgttgcccaggctggtctggaactcctgagctcaagcaatcctcccatctcaggctctgaaagtgctgggtttacaggcatgagccacggcatccggccagtttccccttctttaaagtggagttgattggcttagacgaccttcctggacaccttccagccctgagcccactggctgcaggaggcagagtacgtggcaatgattcattttgttccagctgaggaaactggaacccagaaagtagatgccacctgcccaggaccacacactgattcctgtggtcatcctggacttaatccttgggtctcctttcctctctgctgaggggcacagggattatgctgcccattttccgagtaaggaagctgaggcccagcaaagaaagtgactaaacccactgccagttggctcaggagcagaatctggaaccccggactccagactcctagtgaggaggaggtggggtggcaggatcacctgtaggaccacagagatggtcttctcgcctgccttggctgcccgccattttcggtaagtgtctgccttgagaagattttctgcacagtgagtctggaaacaacagtgggagaggagaattagggcacagagatgacagctaggcctccagctctcagatgattcctttgagtcctcccaaggcctctacgacccccagatttaagctctcccgttaatcccccgacactctgcctggagtttcccctacaacactttcccgtggaagttcacctatgggctctccaagaaagcttccctattcctccttttctctccggaagttccctagacgccggaacgtccctaattcaacatctctccacaattcacttttagcctcctggaaatccccccatgactctccttagacttccaagagaaccccaaaagctcttttaagagctatcctcattaattccctcacgtcttccaacctcccccatgcaggtccctcaccgagtcctggctgctgcaggacacgacatggcggaggcggatctccggcatgtcaacgtcgtgggcttcgcctggccagaaggatgaggtagagtatggggtccgaggggcagggagagtgggagggggcggggtgcgccctgcgctggctaaagtgcgcaagcgcgcgaggctcgggcctttcaaaccccggcgcgccggcgccggcgtcgacactgcgcaagcccagtcgcgcctctccagagcgggaagagcgctgcgttccttagcaacgagcgtttcctccagccccgcctccctccgccacacacaaccccgctctagcctcgcctcccaatgacgtccgaaccctgctttctgggagcctagcaacagaagcgacctccgggattggtgtctggaagaaattcgcctttctcattgcacgatggagttaccgcccacactgaagccgagaaagcaaatctttttgctgtattattatttattttattttttaaaaattttttgttgagacagggtcttgctctctcacccaggatggagtgcagtggcacgatctcggctttctgcaacccctgtctcctggggccaagggatcctcccacttcagcctcctaagtagctgggattacacgcacgcgccaccacattcggctaatttttgtattttttgtggagacatggggtgagagggcggcgggtcttgccatgttgcccagactggtctcgaactcctcagctcaagcgatccacctgcctcggcctctcaaagtgctggaactacaggcgtgagcgactgcgctgggctaggacagcaaatctgagtgaattttcgtagtttcgtagggaacctggattctacgcaacaggatctcttcaaatggctcaggcggctgcactcttctctctgtccccttgccacacacacacacacgcacatatacatacatacgcgcgcgcgcacgcgcgaaaaaaattagcagatctctttcagccttatgcctgaggccaaaagagaagggttctgcgtcctaaatataacacaaagcatgtgcccaacccccaccacacacacacacacacacccctatcctggagttcttccacaaaagcctcagtttcccaatatgtggactgtgggcatctgtcttttactacgcccgcctatgactgccgacagacatccctctgttcattcggtgccttggagacccaagggtgcagccctgggtggggtcgcagctggagacagcccaaacacacaaggagtgtgagccgagcacatgaagagaggggaagggagacaaggcaccccgcacccgcaggaccagcctggacatgctgggtgctccaaggtggggccctacccacactgggtgcttccttgggaggagaggggaagagagagaaggagagggaatcccagttcttgcagccactgggaatcaagaggcccaactccgtcttggtcttcaagcaaacaaacaaacaacaatgggccgtgggaaggtgagaaaacagggtggtgactttctgggttctaatagaagagggggatggaagcccagactcctggggtctccatggaggtggggggctgggcacaagatgcccaggtcacttttggattctggttctgccttcccaacccggaggccacagaggactgccctgggttctgacctcagctatttctccccgtagggtgaatgtgggtccagacccacccctcctcagcttcctataaaagctggggaccaggtactgctgatacacacaccatgaggctctccaggagaccagagacctttctgctggcctttgtgttgctctgcaccctcctgggtcttggtaagtgacaagggacctgaactgtctctgggacctcaggaagagagaggtcccagattgagagagagagagatatagagagagaaagagccttcagcaagtcctcaaggtgaacggggaggcattctggaaattcagattcatggaagaggccaagggtaaaggaagagaaagcctgggggtcccagagaagaaaagctcctgtgattggatccctgagagaggggcttggtgggctctgaatcctccatcctccaggaaggatcccaaacacatctcaattctaggaaatcagatgagagcatggctggaaagggaaatctttaaaaatataattaaaaaaaaaaaaagagggagaaggccaggtgcggtggctcatgcctgtaaccccagcactttaagaggccgaggcaggtggatcacttgaggtcaggagttcaagaccagcctggccaacatggtgaaaccccgtctttactaaaaatacaaaaaaagttagctgagcttggtggtgggcgcctgtaatcctagctacttgggaggctgaggtgagaggattgcttgaaactgggaggcaaaggttgcagtgagccaagatcgtgccactgcactccccagcctgggtgacagagcaaaactccatctcaaaaaaaatacattaatatcatatgatatatttttttaaaagaggtagagagatttcctttctccttagactaagaagttcaggccccagccccctcctcccctgcacacaggagtccaagtaagcctcactttccccaggacccaggtttctgggcccctagctgtcccctctctcagaaccaagaagttcaagtcctctgccctcctggtcctcactctccctccttgacctgggatgcagaccctagcctcagggccccctgcctgagctcctgctgtctacaagacctacatggcaccttcaaggaggagaatcccacattcaagaaccagctggacctgaagtttcacaaaagtccatggaaacctccatcacgacccctccctgcccctgagctttctcagcggaccctggcatccaaaatccccagccatgtaattaggcaaacaggcttcatggtggagtcgcttcccgcccctggaagcagctttgctggcatcaccactgcttcttcgtccaactctggacagttccttgggcagtggtcaacatcccgcccatgaaaaaccagggagctgctggtccctcctctctcaggacacaaaagtcctaagtcaaagtcgtggtccgaagaccacaccacccatgactacagcctcgccctctgtctacactgcagggtgcccactacactgcgaaatatgtacggcggcggggagcaggtgccatggccaaatgaagacctgcagcagtgacaaggacacatgtgtgctcctggtcgggaaggctacttcaagtaagaggatgtggcctgggacctggtggggaggtggggtgtaccttcagggtggaagagactaccatgctgaggggggatcatcatggttctcaagacgggagcgtgggaagaaatcagtggagagcaggaaagagggaaagaccatcatgagatggagggaacagaaataagtggtgtgatagaaatcattattgtcacagaattctgaaaatgacactgtcctaaagagaaggaaaatgtgggaggggtgagagttaatagactttcttaggcagaagaggggtaaggaaagacactgtggggggcagagaaatagtgagaggggaagaatctaactggcaggaggtggaaatggtggggagtggatagagaaggaagaggctgggctggggtgggaaagtgtaagtgtaatcagggaagaggtcattcctgaccgagggaggagagatgatggtggagtgttggagtggtggaagagacagaaaagggatcaccccaaacaggagatggatgataaccttgaagtatggagcaaatcattttttttcttttttgagacagagtctcgctctgtcacccaggatggagtgcaatggcgcgatctctgctcactgcaacctccacttcccaggttcaagcgattctcctgcctcagcctcccgagtagctggaattacaggtgcgtgccaccacacctggctaatttttgtattttttagtagagacggggtttcgccatgttggccaggctggtctctaactcctgacctcaagtgattctcccgcctcgacctcccaaagtgctgggattacaggcatgagctaccgtgcctggctgagcaaatcatcgtaaagaggagaagcagagacagggagggggagatgtggatgagtaaaatgaaagggaggccgggcacggtggttcacgcctgtaatcccagcactttgggaggttgaggtgggaggatcgtttgagcccaggagtttgagaccagcctggacaacaaaaagagatccatctctacagaaaaaaaaaaaaaaaaatagttgcgcatggtggcacatgcctgtagtcccagccacttgggaggctgaggcaggaggatcacttgagcttaggagatcgaggctgcagcgagctaagtgcacaccgctgcactccagcctgggcaacagagggaaacctgtctcagaaaataaaatggaagagagaagatgggcatgagttaaatgaaagagaccaccccagacctgaaaaatgatggaggagaaagggagcaatggaagagaccagtgggggacagagatgtttatacaaagctgaaagagactttcaatcacaggaggagagatgatgaggcctggtgagggaataaaggcgactttgggtgcagggagaaaacactggtcgggagaggctgtgaaaggaaagtgagatcgaaaatcacccagccagcgttggtgggttaaggaaggacctgaaaggcttgaagagaacccccatcccggcatagaagaggaaacgcaccctcgggaagggaggagagagagctgggggacccctcgatggagtgaagggggaacctgtgaattgggtaggaagagaccaccacatggtggggagggggaaggccggggagactggaagaacccaccttaaacaagacctgaaaatagccaagaggggcagcaagagaccctcgttgggaggtctgaggagtgaccatggcaggatctgagagaggaggatgcctgttgctgggaccggggttcattggaagagactacggggtgggcgggggttggcggggagttgaggaggctggaagagaccatttcacgaaggcatgggggtggccataggcggcctgaaatagagtaatcccggaaggacagggagagaggggtggccgtgggtggggtggggtggggtggaagggaccacatccagcaggctgaggttggcaatggggagctggaagagaccaccaaaggccgactaggggctatggcagcgggagggagggctacctaagaaagcactccaggccatgcaccagacagatttggccgcatggc[137 bp omitted]accccgtctctattaaaaatacaaaaaaatagccgggcatggtggcggtcgcctgtgatcgcagctactcgggaggtggaggttgcagtgagccaagatcgcgccattgcactccagcctgggcaactccgtctaaaaaaaataagaaaagaaagaaaaaaaagaaagagaccatcccaggaagttgtggggttggggaggcctagggttaggcaagaccttgaggcaggggttgaagccagggagtggtcagccagcactgtccctgcctgtccccatcccacagagggcaaggagttggtgcacacctacaagggctgcatcaggtcccaggactgctactccggcgttatatccaccaccatgggccccaaggaccacatggtaaccagctccttctgctgccagagcgacggctgcaacagtgcctttttgtctggtaagaagcccgtggtgtgtggtgtgtgctctggctctccactgacccttgctgtagccacttgctggctctgagcctgtttccttacctgtaaaatgcagtgtctattagcaaccctggtgtttcccggggttgttgggaggttgggggaacggcttaaacatccctattcaccttacacttcatcctcatcctcagttcccttgaccaatcttactgagaatggcctgatgtgccccgcctgcactgcgagcttcagggacaaatgcatggggcccatgacccactgtactggaaaggaaaaccactgcgtctccttatctggacacgtgcaggctggtgagtggtgcctgaatctctggaaaaggaaacagaactagaggtccaaacttctaggttcgatgggaggagagggttccagagaagtgggtgaggatgtgttctgggattatgaggaagaaggggctgaggtccctgattccagtctgaaatctccctttcaggtattttcaaacccagatttgctatgcggggctgtgctacagagagtatgtgctttaccaagcctggtgctgaagtacccacaggcaccaatgtcctcttcctccatcatatagagtgcactcactccccctgaaaagctatctgaacagaggaagataatgtagtgtgaagtccccatttgtcctcagcctgtaactccccgtgtgcctataaagaagttaatagagcaagcctgagtccttgtggtgtgatgtatcttgatgagatagaatgcaggaaatagggggtctcaatcctcatttcaaatcccctccttttgaggaagagagggaaggccctgccttctttctttctttctttttcagacagggtctcactctgccacccaggctgaagtgcagtggtgcattcaaggctcactgcagcctcgacctcccgggctcaggtgattctctcacgtcagcctccctagtagctggcactacaggcatgcaccaccatgctcggtgattctcccacctcggcctccctagtagctgggactacaagcgtgcaccaccatgactggctaattttttaatttttttgtagcaacagggtttcaccacattgcccaggctggtcttgaactcctgggctcaagcgatccttggcctcccaaagtgctgggatgacaggtgtgagctaccatgcctggtggccctgccttttatgaagggattagtctttgccaggtccctgtgctgtgttttccatgctatacctcatttcatgatcataacaactgtgaggttgatattattatccccactctacagatgaacaaactgaggcatagattgtgggtgtcaaaatttgccttgggtcaaacaaccagggagggtcagaaccttgatttgaacccgagtctggtatacttcagagtccatgatcatctctctcaattaactgcttcctctttttgcctcagtgttcatgtctgcaaaatgtagatattaatagttataacctcataaggttgttgtaagagtcaaatgaaagacaacttaaaaagcgcttagtgcaatgcctagcaccacatgtggattctaaagacaatgtatgcctgagtaaacagtaatcatcataatagctgccacttactgagtggccattagttgacaggtgctaaacactgacatcaattgggacagactagatgttacagtaacaaaacaagtccctgatctcagtggtttaaaacaacaaagttgtattaa[132 bp omitted]gcctcaacctcatgggctgaatcgatcctccccgctcagcctccctggtagctgggactacaggcatgcgccaccatgcccagctatttcctgtaatttttttgtagagacagggtttccccatgttacccaggctggtctcaaactcctgggttcaagtgatccacccacctcggcctcccaacatgaaaactgagacttataccaacaagcattcttctaagggtttgtgggatggctgctttggctccagttcgggaggattcaggtctcttccatgagattccacaattttctgggatcagcagctccctcgcaaatgttctcatggcacatcacgggagcacaaaagccaagtgcacttaagggccttgctaaggttaggtctgctaaaattccattaagtaaatcatatggtgaaacccatcagtggagcagggaaatatactccccctccagtagaagggagaggagtggatatttgctgaatgactgcccattcacaaaaggtaaacttttccttcaccctagcactatccagagggtgttttcctcgtcatagtcataaatcagccaccggcagggcacgatggctcacgcctgtcattccagcactttgggaagccgaggcaggaggaccacttgagcccaggaatttgagaccagtctgggcaacatggcaaaaccctgtctctacaaaaatacaaaaaaaaaaaaaaaaaaaaaaattagccaggcgtggtggtgcacgcctgtagtcccagccacctgggaggctgaggcgggaggattgcttgagtccgggaggcggaggccacagtgagccgagatcttgccactgcactccagcctgggtgacagagtgagaccctgtcttaaataaataaataaataaagcatccaccaacttgaatgtggccaatttctgtgtcacaggaagtctaccatgggtaatcacatgctgtgacataatacaagtcactggatggagctagtcacatggcccacccagccacatgggcaccaggaagtgagatcctgccccaaggtcagaaggcagagaactggacatgtttcattaatagcacaaatgaccaccatgaccccttaagaagctgtttttcattttattttcacaactctatgtcataggcactattattcacatctctgttttcaggagacatcagaggctcagaaggctgtcacattggcagtcacacagctaaaaagtggcagaatttaagattttaatcattgggtcatgttgttggggagaaagagaccacatcacacacagagagaacaagtctgtattagttgcttttgctacataacaaaccactccaaaatttagtggtttagaacaatcacctatttagttaatgattctctgggttgcaacttggtctgggatcagctgggcagttcttttgctggtctcagctgggttcagctgcctatcagctagggagctctgtttcagaggttggttggctatgggtggcagggatcaaggatgacggagccatgtgtctcttttccctttattacccagcaggttagcccagatcttttccttttctttccttctttttatttttttagacattgtcttgctctgtcacccaggctggagtgcagtggagccatcatagctcacttcagcctcgacttcctgggctcaaacaatccacttgcctcagcctcccccatgtagttgggaccacaggtgcacaccaccacatctggctaattctgttgttgttgcttttttgtagagatgggggtcttgccatgttgctcaggctagtctcgatctcctgggctcatgaaattcttccacctttgcctccctaagtgctgggattatgggtttatacccatatgccaccatgctcagccagcccggggtttggatgtggcagtggtggtaggggtcccaaggggagcaagagaggaagtcccagtgcataagcactttggttttttttttttgagagaagtctcgctctgttgcccaggctggagtgcagcggcgcagtctcagctcactacaacctccgcctcccaggttcaagctattctcctgcctcagcctcccgagtagctgggactacaggtgtgcaccaccacacccagctaattttttgtatttttagtagagagacggggtttcactgtgttagccaggatggtctcgatctcctgaccttgtgatctgcccgccctggcctcccaaagtgctgggattataggtgtgagccaccacacccggccgcataagcactttccaagcctctgcttgtatcatgtttgctattgttctagtggctgaagcaaaccacatagtcaaacctagaaggagagcaacaatccaagggcatggctacagaaaggctggcccagttggggtcattaatgggtatacctggctccagaactaaggcgctttaccatcataagctcccaatgtttaaacagtaagtctgcccgcactccttccagggtggaaaaactcagatactgataaattctcttgatcacagcccagtttttcccagcggattccccaccatccctcctatccccagacgctggagtctaggtttccagcccagtcaaaatctcaaggatctttcttttccctcaaactccaaaagaacagacacgcaataggatttctattcatttttattcattcctccaaagagcaccacaggccaaccacacccttgatgtgtccttcatggttccccactgcagtggacacaaatccctccatcattatccaggcatggatggaactctgctgtggtgaggaggttgtctcgcccactcacccaagttttccatgcctgttctgcttttgatggcaatgccaaaattcatcatacatttccttgaattcctgccttcaagggtcttccagccctgtggtgccatgcagacacacttcagtggcggccagtgatctgtctacaagggagtcttagtcttttctgcttggatgctcccagggacagatgcctgccaacaaccttatgtcttcacaaagactaaaatggaatcccattaaaagttatgatttaaaaggcgaccacccccaaaagaagtcataacactcaagggtgtcaatatatacaactgtgtaaacacaaccaatctacaactatatcaacacaaccagcactcctctatgggcacagacacacacacaaaattgtcttgctttctcagatatgatctctggcatgactcctgctggcatgagggcagaggaaattgagaggagcaaagcatatagcagtgatgtcagacaggaccaaatcagagacagggtcaaagtggcagaaaaatgaggagcacactccgagcaaaggcatgggggtgagacaaaggcacccagactagagccatcttggtgctgcccaggggtgggtggcactcatgtttgagctccatgtgtcaggcttttcaggaaagggtgtactatgttatgtgtctgtgtgcatattgtgtgcctgcatgtacatacatacgctgaattctcaccataaccatgtgaggtagatgccatttgtagagtgacttgcccaagtcagtggaaggactatctgcccctagagctagactgatagaattttctatgttgatggaagtattctgtaccttccctgtccaataccatagccactaatcacatgtggctactcagtattaatgttgcactactgccaatgaaacatagaattttaagttgtatttacttttaattgaacagctgaggccaggtgtggtggcccatgcctgtaataccagcactttgggaggccgaggtgggcggatcacctgaggtcagcagttcaagaccagcatgcccaacatggtgaaaccccgtctctgagaaaaataccaaaattagccaggcatggtggcatacacctgtagtcccagctactcaggaggatgatgcaagagaatcagttgaacctgggaggcagaggttgcagtgagctgaggtcatgccactgcactccagcctgggtgacaaagtgagactctgtctcaaaacaaaacaaaacaacccagcaacttggtcaacataaccagacctgcatctttacttaaaaaaaaaatggacacccatctcagtttttggaaaactattatataattggaacaacttggatatgtgaatctacttctccaactatgaattttatgaaatcaaaataaaggtcaagcatttcagataaaaatgtaccatggtaattgagatttggtgtaagtgtaaaatatataacagattttgaagacagcacaaaagaacgtaacataattcatttaaataataccgatgacgccaggcacggtgcctcacgcctgtaatcctagcactttgggaggccgaggtgggtggatcacctgaggtcaggagtttgagactagcctggccaacatggcgaaaccccatctctaaccaaaaatacaaaaattagtgggcatggtggcgggtgcctgtaatcccagctactcgggaggctgaggcaggagaatcacttgaacctggaaggtggaggttgcagtgagccgagattgtgccactgcactccagcctgggcaacaaagcgaagcactatctcaaaaaaaaaaaaaactaaaaaaccgatgacatgttgaaatgctattttggatacattgggttaagtaaaacatgttaaaatgaatttaacctgtttccttttacttgtctaatgtggctattagaaaacttggcttactcagcactttgggaggctgaggtgggcagataacttgaggccatgagttccagaccagcttagccaacatggtgaaaccccatctctactaaaaatacaaaaattaggacgggtgcagtggctcacgcctataatcccagcactttgggaggctgaggccggtggatcacctgaggtcaggagttcaagaccagcctggccaacacagtgaaaccccatctctactaaaaatacaaaaattagctgggcatgatggtgcatgcctgtaatcccagctacttgggaggctgaggttgcagtgagccaagatcgcacaactgcactccagcctgggtgacagagcaagactccgtctcccaaaaaataaataaataaataaaataaaaatacaaaaattagctgggcgcggtggctcatgcctgtaatcccagcactttgggaggccaaggcgggtggcctgaggtcagtagttccagaccagcctgatcaacatggtgaaaccccatctctactaaaaatacaaaaattagccaggcatggtggcatatgcctgtaatcccagctactcaggaggctgaggcaggagaatcacatgaacctgggaggcggaggttgcagtgaggcgagatcgtgccactgcactccagcctgggtgatggagtgaaactccatctcaaaaaaagaaaacttaaaatgacatatgtggcttgcatttcgtttctactggacagtgctgccctgcagccctcccattccatcacgtggctgacatgcctgattgcagggcttagacactaatatgatggggtaaagatatggatgaatattcttccccaaagctgaaagagctttcatgaaaatgcctggagccattcagtatagaactaagtgctcttccccatggtagctatctcaactttgaagggacaaattttgtcagcagtgggagtccaagctggagatgatggtaccatcccttgtctgcccttggatcagttacctttgtcttcagcttttaagggagacaggatctcaaaactaaggttcttatccagctcttttatttcacagatgggaaaataaggcactgtccaagtaacacacagtgacagtggcaaagtcgtgcttgcttcccaggtccctgacctcagacaagggtgttctctcccattaaatgcttttttctcctcatcttgctccattttcctatcttgtggcaagagattaacaatctaaattccaatcctagttctgacactgaccaatgaaataaacatttaggctgggtgtggtggctcacacctgtaatcccatcaaggcaggaggatcacttgaggccaggagttcaacactagtgtgggctacaaagcaagacccccgtctctacagaaaatttggtgctgtgtacctatagtcccagctactctgtaggcggaggtgggaggatcgtttgagcccaggagttggagatggcagtgagccatgatcatcccactgtattccagccggggcaacagagcaagaccctgtctctaaaataataataataataataaatatttacgaagcacctattgtgtcaggcacctattgttctagatgctggggaaacaacagagaacaggacaggcaacgggtcaaaagccaataaacaggtaaataaataagatcatttttgacagtaataattgctacaaggaaactcaactggccgaaatgaatagtgggggaatgtgagctacttcagatagggtggtcagggaggggaagtcctctctgaggggatacgtgagctgagatctgactgagcccgtcacaggaaggtttgagagtagaacaggaagttgtgagtagagccttgaaggaaagagaacagcaggtgcatgggtccccaggcaggactcaaggtagccactcaggcatcagaaagagtcaggcggccatgatggctcacacctgtaatcccagcactttgggagtctgagtcgggtggatcacctgaggtcaggagttcgagaccagcctgaccaacagggtgaaatcccttctctactaaactacaaaaattagccaggtgtggtggcacatgcctgtcatctcagctacagtcatcacatccctgtactccagactgggtgacaaggtgagactccatttcaaaaaaaaaaagaaggaaagtctatcaggctggacaggagtgggaaggggcagtgaatgagaataggcaagggccagacccacagggccttactgtgtgctgttgggcctcaagcctgccctctctggactttgctctttctgtctacgacaaaagggattctatcgcttggattctcagatcctccttttctgtttttgacactgaagaattctgtaacctgcaacttttcccccacatgtggctagcagcctagaacattccaggcactgtggtttctgcctttgcttcattcactcctggcatattcccatggtctcaagtgcctgaccacccatttggtgggcccctggctcaatgcagcaccctctatgtacatcagaaagcagagcctcttggggatacccgaggtgtccatacagaagtgtttggaccagtgcagcagtacagctgctcttctgaaaaggaaggtgcacaaaacaccaaggccataaagggttatggttaaataccaggagaaaaaggccaaaaaaagatagaaactcctaaagaaaagagacagagaaacagactccccagagatcacctgaattgctcagcacctagaagatgaaggcagtcatatcccttcccagtcacactcacagaggcagttgccgggatcccaatacaaggtttggaggagctgtctctgaggtatgctttactgcccttccacacccaaaagacctcattcctggtccctggctactcccagagcccaccatgcccagacctcttacccacctcacctcatttttgtgggaccaccctccctacatgcttttggagggcaattatagaaacccatccactccccaggagagatcaagaagtctccagctttctcgcacaagcccccgatccctcctccagatgcagacctccccttacccaatatttaggaaccaaggtccacagccatcttagaaccccggaagtctcagaccccaggggcctccgccaccccatcaagattcaaagcccactgctccttggggacctgtgtgcaggctttttctcccagagaaatgtagaccctgtttccctctgaggctctgaagcccaagagttccagctccctggggcgctcaggtctccctcccctatactggagttcaggtcccagtcatggacacctccccaccaattaggaaacaggacttctaccagcctccctggaggactaaacatccagtaactccagtttctactccctaggagacaaagacatagtccctgctagagtctgggccaccaactcccttcaggacagaagggtctagatgtcattcaccatggttcccaaaggtatcaggattcctggccaggggcggtggctcacgcctgtaatcctagcactttgggaggccg[134 bp omitted]gaggcaggagaatcgcttgaacccgggaggcggaggttgcagtgagccgaggtcgcgccattgcactccagcctgggcaacaagagacttcgtctcacaaaaaaaagaaaaaaaaaaaaaaaaatcaggattcctgtcccccagactctctgaatccaggtgataagaagtcacacatcccagctggaagtcaagagtccacatccccttcaagcacccaggattaagcccaggcatcccctgtcagagtctggactcccaagccccctcccactcctcactgggcaggctcagggggtgccagcacagcctcagcatcagcccgcatctcatcgagagcctgcagcaggacgccgtgagccgctcggtagcccaggccacctgtcgccgctgcaccacccgcaggccacaggaaggagagagcccccagtgctgcgcccccagcagtgccctcgcccgcccaggcgcccagtcttgcttccacctcggcgcgcgtcaccgggcctgggaaatgagcgcgcgctgccagctctccagaagccaggcccagggcacgctcacgtcgagccagtgccgtgggttccagccccaggccccgtcgccactccgccagctgaccccgcagaagtgccacgtcgcatgcccagcccagccctgggagtggtgccgccgccgccgccagactagccagcagagctggcctccacgccccggctcgcaacgccgcagccttggttcgggcagcgctgggagatgctggtggcaacgccagcagcagtgcccctgcctgggctggggggagcgctcgccgcagccattcgcatagccctgggagtccgccaggccgtagggggaacactggcggcggcgcctcctccagcacctcccacgtctcgtcctccgggcttaacgcagcggcccgctctgagtcgccaccacctgatttcttcatgccgacaacctgctgcaaaccctcgctgccagctttcccaggaccttccccgctgcctgctttctgcgatccagcgctacatttctcccttcccttactgagtgcattctccaatccccctccacctgcgttctttaagctctcgcccttgggattctccatcttgccttctcccagacactccggatcctcgccctcgccgtctgtgcgcacgcagacaagaggcgcatctggtagcagcaaggcctggacctgggcccagtccttctcagtgggggccccaggggtgacgaggatgagggcgtcgtagtgcgttgggtgagaggcggcggccgcggtggtggcagtgcccgtgtggcccagaggcacggtccagagcaccacattcgggcgctctggggctgggaagggagtgggtgctgtggggaccgaagcaggcgcagcgcctgggtcgccaggatccaatccaagcagcatgtccaccacaaggcccacgtcagccttgccagccacggccaggtctagccgtgcgctgcccaggcgctccaggcctgagcgcacccacgacagcgcagcctcaaggccgccggtctcaaaggcctcacgcacagcctctagctctgctgcacccaacacctcgaagccatcctgcgccggtggcaggagcctgtggggacaagaagggacagggtcaaaggtagaagaggggctgggtgacatggactgggctatgatgacaagggcagagctttcctaatgatcccagaatggggcaggggtaggaaagggaagggccagactgatggcacagcaaatagaaaccagatagggagaggcagtgatgatatgggtggggcttcaagcaataatggagtcttgattattggacgggtggacataaggtcaggtttcccaccccagcctaaaatggggattgggctaaaacttccatggaatacagtatttgggggcggggtttttccaagggtcggctgtgctgggtgggacaaagctcacagagggtggggcctagaacaaagaatcgcaactgtattgtggcctaaacacaagtccagcactatttgagacaaggtccccaagggcactcttttcaggggctgggcctaaggagggtcagtgaggggagaaatctcatctaccagttcttaccaagggggagtggctaaggtgactcccgggcaggtgaggctaaggaaaaaagatgacagtgtactgggacaagggactgtccctctctgagcctcgttttaaagtctttaaaatgaggaggctggcaggtggtagagcaaatccaggaggtagccagcaagtgggcacagaaacaagagggagctggagaaaggaggtagatgaggatgccccaaaataataaagctcattgcgggtgtggctttaggtgcttgaaaacaaaactgatggtggggagggctcaaagattagagttttcaggtaaaatcttccagggggctgggcagagagtctcacgactgtaatcccagcactttgggaggccaaggagggtggatcaccttggtgggggcagggcctggaaaaaggagcctcagggccccagcagataaagtgttaagcctttcccttttaattctagggctttgggaagcctgggtgggggcatggcttgaggccaagagttcaagaccagcctggggaaacagtgagatgctgttttgcagcctgtagtattagctactctggaggctgaggcaggaggatcatttgagcccaggaggtggaggccgtcagtgagctaggatcgcggcactgcactccagcctgggcgacagagtgagaacctgtctcaaaaaaaaaggccgggtgtggtggttcacgcctgtaatcctagcactttgggaggctgaggcgggagtattgcttaaggccaggagttcaaattcaacctagccaacatagcgagaccctgtctctcaggaaaaaaaaaaaaataataataatagagctaagccttgccccaaactcactgggggagggatctcatggacctccatggtcgcacctaggtgcctagggtctcgactaacggacccagccagaaagccggcactcacctccgcagcgcttctgcctggctctgcagcgccgcccggaggcgctctagctcctcgcagccgtcgctgctgccgcagttcgccggtagcacaaacagatccgcagctcctaaccccgcgctgttcagcagagctgctgtctgatcacgggcctgggcggcagtctgtgaatccccaggacggaggttccgcacagccagtagcggggtccctcgggccagggcggccagcgctgcctctcccagggctggagccaacggttccccgttcccctcgggtccgggcagcaccagtaccagcacgttggcttccgccgcccagggccccggcgctgcgggtgggcagctcagctcgcccagaaaaaggcctgggcccgcagctcttaggctgggaaccccggagtccggccgtccctcgggggcctcgagcgtctccacatccttgtcgcacagcgctgcgatcagcgcggacttccccaagcccggaggccccaggaacaaggcggtcacgtcaccctgcggcggaggcatggctggaaagcaacgggtagagaagacctgggtcagggagcacctagccttttcctttcctagccgccccactcggaacccaggcctcagtccttcaccctgtccccttcggttcttgagtgtcactctccaggacctaaaaaatccagagcccagaccctattcccccagaatcccaggcgtcctgtctgtccgccctccctctagatggaaacgtttccctttctgcttcaaaaactctgaaatcaggcgcggtggctcatgcctgtaatcccagtgctttgggaggccgaggccggaggatcgcttgaggccaggaattcgagaccagcctggccaacatgtggggggactctctggtagagtctccgtctcgataaaaaataaaatttagccgggcatggtggtgtgcgcctgtagccccagctactcggaaggctgcggcgggaggatcgcttgagcccaggacttggaggctgcagtgggccgtgatcacaccaccgcactccagcccaggcgacagagcaagaccctctctgaaaaataaataaaaataaaacctcagaaatctggcttccagtccctcctccctcggacacattgttattttcatctttccccttcccccttccaaatcaccaaccgagcaaaaagccgacccacgggagagagcgcagtcggtggcagtaggtcagcagctgagaagcccggcccctgggccgcggcggacggaggccgaagaggccagggagcggtgatttagagatgccgggacccgtcccggtagctttaacctgacgtcactccctctcccaagggggtgtgtcttggaaggccgacagcagagacccagcccttcgccgcgcctgcgcagaacggccgaagtgtgcacgcccctctttggcggcctcagggcctagaacaatgaatgagtcaacgcgcctgcgcgccacgagagcctacccacgcatgcgcaaaaggcttagctagctaagccgcgggaggctgaacgtcatcaaacgcgccatagggcagagaaggacccctcccgttattttgaggaccgggctggtgcgactatactactgccggatggcaaatccgggatctcggctccgagaggctcatctggcaaaagggcgcggaaaccacgggggccctgagactgagtggtccctatcccacttctctctggggcggcgctgtagccagcggctgacaggcgcagcgaaaggcagccctctgctgtaaggaggaaaactgaggcctgggagcaggaacctgtaggcagcgcttgagggtagcgggatagcagctgcaagcgcgcgtgggaggcgggggctctgggcggaacaaaaatcacaggatgtcagaggatgtttcccgggaagaactgggataaagggtgggtatcactacctgccccaagacacttgagattgggatgacgctggtgtcaaagatcaaggcttccacgctgagttcagggagttagtttgatgcagcaggtcataggtcacaccagtgagaagactctaggggagtcccaaacccaggaaatccagtcctttgggaggtttgaagcttcttttagcaagaactccatcaattagagttcaaggagatagtatgtcgtaggggtcaaaggcaggcaaggagagcctctggcgatgtcaaaggtcatagacttagggtgccctctaagactggtaacagatgaacagcttcacttatgcacgctcctctcctgactagaagggtcccagcaccatggaggacccgaaccctgaagagaacatgaagcagcaggattcacccaaggagagaagtccccagagcccaggaggcaacatctgtgagtacacatggctggcgggctagaggagggtggggtgcaggagctgatgctaagatctctgtggcacttcggtgtccaaggcgccacagagttttgcctgttgagaaggggctgtaatggtccctgagctgctctagcaggaagtgcatctcctcacaccagcttatgtggccagagtactcaccctcctctggccacataagcaggattgcaatgcttatgcattcagagggatagggtggcttccaggagaggcttgggttggagatgtggctgggaatggttctattgggagagaaaccccaagattctggtcccaactctgccctagactttcagtgtaacttgggccttggtttccttgactgtcaaaagagggtggtacttcccacctcacagggtgggtatgggattaactgcagcaaaggggaaagctaggggttaatgatggtagccagtttgacatgtaatagcaacacctcctgctcagtgttttattatgagctaggtgtatttattctcatattatgaaccattttaacattcattatctcattgagtccttctaataataggccctttaaactgggaactgaggcagagagaggtatttgtaacaagagctgtagtctcaatgcccttgagccagagactaccaggaacacacctgcagttgaacacgttgggtttctcactgcaatgaacacagaccatggggggactgtggggtgtctcactaagaatggtaaaaacgacacaggatttgggcttgtgggtggtgattttggggaaggttcaagcaaaattgttttgctctggattggatgctaccaggaagcaggggcaattctatgattggctatcgtaataaatcttacccagaaggaggaaggaaggaggcgaggctcaagctctgactgataaagcagcagcagacattcacattagccaggataggaggatgtttggtcatttttctgcttggacagtattcatattttgtctgtgctcagacattatgatgatgtagtcttgtcttgattcattttagtcacagcgtggccttgtctgtccttgatattctgtgaaaatttatgttcaacagaacaccaaggtctagctgtgagtaccaggccagatcctggatgtcgggctggatttctctgtatcattagtcataattgcaaatgactgtacagcaattcatttattccttccaacggtcctatggagtagatactgttattagcccattttccagataaggaaactggtgtaattgcctaggaagtggtggaggtgagattcaatcccaagcagtctggctccaaaggctgtgctgtaatcaccatacccctctgttgggcaggctgactctctgggttccaaccctggctccaccatttcctttcctagcctcatgactatgggcaacttgcctaacctctttgaatctcagtttgctcatccataaaataggtgcaagaacagttctcctgtttggttgtccagcattagcatagaacctagcacataacacattcaatgttaattgttggtgtgattctggggttcaggaagaggtcttggagactcctgctggcctcccctgacctctcccccacattcctcaggccacctgggggccccgaagtgcacccgctgcctcatcaccttcgcagattccaagttccaggagcgtcacatgaagcgggagcacccagcggacttcgtggcccagaagctgcagggggtcctcttcatctgcttcacctgcgcccgctccttcccctcctccaaagccctaatcacccaccagcgcagccacggtccagccgccaagcccaccctgccggttgcaaccactactgcccagcccaccttcccttgtcctgactgtggcaagacctttgggcaggctgtttctctgaggcggcaccgccagatgcatgaggtccgtgcccctcctggcaccttcgcctgcacagagtgcggtcaggactttgctcaggaagcagggctgcatcaacactacattcggcatgcccggggggagctctgagtgcagcttaagcctctccacggtgacgggtggctctgtggctggtaggactcacccatgatatggggtgcaggaactctgggggccctgaaggatttgcttccctcccctgggaaggcagagggctcttaataaagaggacccagaagattcttatttagagcttcagtctttggagcacacagggccttcgtgagacagtgaaatcagataataatgagatcttttgttaaaaaaaaaaaatgggaagggagtgcgggagagaaatggtttgtgtctcccttattcccagttaaatacctagctgcagattgtgccatcacccttcattcttcccagatggatgccatgggctatgggagcaaattgccctggacctttgcctgaatgggggcaggaaaggtgaggtgttgctggcctgtaatgccaccaggtgagttccagatgtggagcaacttgggcttttggggatggggcagcaaagttgggagctggaccccaattgagtgggggtagcaattggagtccttgtgtctcttttccaccccctgccatcctcacttagaggggccatggcactagatggcactagtcccccgataatttatgtctcgttgaaataattttgtatatcattctagtcctgaaatatttttttcatatgtgtaggtgaaatggtatgaataagctaacaggaatagtatctaaaaacagaaaacatccatattaaaatgtctaaacagggagctctggcttttgagtgggaatttccagagaacataagggtgtgggcaggtgggggaactcaggccagagttggcctcgctttgtggggaaactggtttggaatcaaacagagataccttctgtttcgggttttatttggccaacactgggagatttcccattaagatcctattttcagctctcttgaaaggcccaacctaggctgacattgtcagcaggggcaggacagaagttacaacaggctggagggagcagtgggtgtcaccctcaactggagatgagtcccaccaggccagttttacccccttagttacctgccctgcacctgcagacaatggtcgatgccttgcatataatacttatagactctgtttatgttgagggatgtttttaaagcccacaggtgaggtggatgtggtagactgatcactgtctctgtttttagctaggcacacagtagctgaaaagactgcatttcccagattcctttgcagctagatgtggccttgtgactgatttctggctaaattcctgggtagaacagtcaagcttaagaaagggacggctgggcacagtggctcacgcctgtaatcccagcactttgtgaggctgaggccggtggatcacctgaggtcaggagtttgagaccagcctggccaacatggtgaaaccctgtctctaccaaaaatacaaaaattagccgggtgtggtggcatatgcctgtaatcccagctacttgggaggctgaggcaggagaattgcttgaacctgggagacaggttgcagtgagccaagatcgtgccattgcacttcagcctgggtgacagagtgagactgtttaaaaaaaaagaaaagaaagggacataccttttttccaccttcctaactgtaatacggaaatggtatccagccatctcagaccataaggataagagcaacacgtgggaagacagagcaacaagataggagcctgggtctctcgtcaatttcaaggagcacagccaccataccagcccacttccatattgctatctaagaaagaaacttctatcttatttaagccaccattattttgggtctctgtcacatgcaacagaatttacagcctaagacaggggtctgcaaactatggccaactctagcctgctgcctggttttgcaaataaaattttatttgaacagttttatactcattcacttatgtatcgttgatggctgcttttgcctagaacagcagatctgcatagttgcaacagagattttaaggcctacagaacttaaaatagttaccatctagccctttacaggagaagtttgccaacccctggtctaataagacattcaacctactctgagtctggaagcagaaatttccatcctgggaaccaccatctttaccaggtaggtaggtaggtagggtatgtgtgtgtgtgtgtgttttggggcagggctaccctggatctctttgctggggtgacttatggggagactggttggagttagtagaccatcagtttttttcaagataccaacttcatgaagagccagatatttcctctggctcctggtgaatgctccgaagtttccaacccagatattgtcacactacccccacagtggctcccctaaaccaaacctaagtatctaatcccacatgctctcccaagatagcagcctgcccaagtacaccctgggcttcctgttctctccagacatcacagattctctaaatagcatcactgatgacatccacatctttatctgcagcccaaaccccagacataagatataaccacttgaataaacaaatggagatctcaaacttaaaatgggtcaacaggactcctgcggcccaacctgcaccaccattgccatcatgttagtaaactgtgcactcttaaattcttttttcttttttgagtctcactttgtctcccaggctggagtgcagtggtgtgatctcagctcactgaagcctccgcctcctggattcaggcaattttccagcccc[132 bp omitted]gcctgggcctcccaaagtgctgggattataggtgtgagccactgcacctggccttcattttttttttttttttttttttccccttcagacagggtctcgctgtgtagcccaggatagagtgcagtggtaagatcttggctcactgcagccttgatctcctcaggctcagatgatcctcccacctccacctccctccctgtagctgggactacaggtgtgcactactatgaacagctaattttttgtagagatggagtttcaccatgttgttcaggctggtcttgaactcctcggctcaaacaatccgcccacctcgatctcccaaagtgctaggattacaggcgtgagccaccgtgcctggctgactttcagccttctaacacctgtgtaactattccctgtattaaatcctctttggggaatgcctggcctgactccatatcctgaatgggtgctggctgaatgacccaactcctgattgatagtgcctcttgtgatccttaggaatatttgccaatggatggaaattctctatatttgtccttagaagtcctgtcttatggcagaagacaggatggggtgctgctccaggaaacaaaacctatgatcacacttatccatgtgctatagttgaatgtatgtgtccccctaatattcatatgttgggaacctaagaccccatgtgatagtattcagacatggggcctttaggagatggttaagtcacaggggctctgccctcatgaacaagataagtgcccttagaaaaggacccaagggaagtagctaggccttctccccttccatctctcctaccatctgaggacacagcattcatccctttctgccaccttccactgtgtaaggatgcagcaagaaggcaccaacttggaagcagagagcaacccttaattagacaccaaatctgctggttccctgacctgggacttaaccactctccagaactatgaggaattaacctttgctctttatgaattacccagtctcaggtattttgttacagccgcacaaacggactaagactctgttgttttaatgagcctggaatttctgctgatgattctgaggttccatgatgctaagctatagtggctaggaaagtctcagttcagagtgtatcaatgtcaggtttggagattctgggatgagaaacgtgggttttgaaaaatgctttggtctgaaatcctgtaataggtgtcaaaaatgtaaatgctggccaggcacggtggctcacgcctgtaatcccagcactctgggaggccaaggcgggcggatcatttgaggtcaggagttcgagaccagcctggccaacatggtgaaactgcatctctactaaaaatacaaaaattagccgggggtggtagtaccgcgcctgtggtcccagctactcagaaggctgaggcatgagaatcgcttgaacccagaatgcagaggctgcagtgagctgagatcatgtccactacactccagcctgggcgacagagcgagactccgtctcaaaaaaaaaaaaaaaaaaaaaaaaagcagatgctcttcagggccaagcaggcagggtaggggtgtccagatgtgaggcattggtgactgggcacataagagtgaatgcctcccctacagaaagtgactccttctcagcaccaacaaaccactatccccatgggaactgggggttcagcaatatagatctcacaattttcgagacagtccagaaacttcaatttttttaaatgtgaaattacccatttttcaacattggtaaccaacgtaacttaaaaaaattcaatagctctgtggagaccagatacactcctctaagtcagatggtggctgtgggcactagactgccatttctggtgtgtggcttagtggttaagagtggatgcacctgcatccagttgtctgggtacaaaccagggctctgctgcttactggctttgtgacctctggcaggtaactcaacctccctgtgcctctgttgtagcagatttttttttttttttggagacggagtcttgctctattgcccaggctggagtgcagtggtgcaatctgggctcactgcaacctccgcctcccaggtacgagcgattctcctgcctcagcctcccaagtagctgggacaacaggcacgcaccaccacactcagctaagtttttgtatttttagtagagatggggtttcaccatgttggccaggctggtctcaaactcccgacctcaggcaatccacctgccttggcctcccaagctgctgagattacaggcatgagcaaccatgcctggcctgttgtagcagttataaaatagtcataaaggtagcctctaaggattattatgagcactcagattactgtgaggactcagacttggagacaatgccaaagtcagtatatggctcttacggcctggttctccgctactttctgacctcacctcttacctgtcttcctcagttccagcctcgtggccctgtgttctcttcccaagcaccccaagtgggctcccacctcgggccattgcatttactgtccccacagacagccacaaggctcactcctgccccttctctaggtctctgctctgatgtcatctcagtgaagccttccttgaccaccctacttaaaactgcaaccttcacacacacaagcttcccaccctgttcctttttctccatagcactta[143 bp omitted]gcctctccgagtagctgggactacaggtgcccgccaccatgcccagctaattttttatattttt[133 bp omitted]tgattactgtcttccccattataacctccacaaagggagggggtttttgttcattgtgttgactgctatatttccaactcccagagcagtgcctgccatctcataggtgctcaataaatcattgttgggtgaatgagtaaacaagtaacagtccctaacttgtaaggatctgatgtgactgtccacataaagcactgagcccagggcctggtccaccgtgagcgctgacttaatgatggccattacagtaattcaggttctattcttgaaggttcttagtctccaaccttctatgagttaacacatgtaaagcgccttagaacagggctggttgcccagtaaattctcagtaaatgatagctattattataattaggcttctattttcaaagtagcttcggcgccaagcttctgtgaattacgaattagtacttcccatctctgagcccaagttttggcaaggctgtaaagagctggtcctttgctaccctttgacctcatccctacagctctcgcctccttggcacaccaggcaggctcctgcctcctccagcctgaagtgctcttccccattgatgtacatggctccccccggcttcagatctgtcaccttctcagggaggactatactctttaaaattgcaacctccttccagaacagttctcccttcagtccttttttaaatttttttcttgcaacaaattcctgccatcatccaggctagagtgcagtgagcacagtggcacaattacaggccactccagcctcaacctccaagcctcaagtgatcctgaatagctgggaccataggcatgcaccaccaagcccagctaatttaattttttgtagatggggtctcactgtgttgcccaggctggccttcaactcctgggctcaagaaatcttcccacctcggcctcccaaagtgctggaattataggtgtgagccactgcacctggccttccttcagttttttttttgtgtgtgtgtgtgtgtgtgtggtttttttttgagacagggtctcactgttgcccaggctggagtgcagcgacacttcttaggctccagcaatcctcccacctaagcctccctagtactaggactatagccgtgtaccatcgttagcccagctaattttttgtattttgtagagatggggttttggcatgctgcccaggctggtctcaaactcctgggctcaagcgatccacccacctcagtgctgggatttcaggagtgagccaccatgccgggcctcctttcagtgctttattgttctcacagcatttatcagcacccggcatatgctgtatcttacttgtttatgtctgtcttcaccagcagcctctacccactcccatgtaagctccatgaggacaacgattttattttattcactgctgtgttcccaatgcttagcacacagcaggtactcaaaaatatttgttaaatgaattaatggatcacaatccctgtctcacagggttattctaagaagctgataatctcatgcaaattaagtacagcactctgtaagtgctgggaaaatggcagctgcaattatcattaaggttctatttttgtaagttcctagatgcaccatttctatgagtcaatatatataaagcccttggactggcaccagatacccaggaagcgctgagaaagcgtagctgtgattataattaaagtcctctttgtggaagttcctaggctatgtggcagaaagccctagctgtcctccatgaactgttttctgctttctgggcgcttggctagactgcttctcccaggttgtttttgcagttagctgcggccacatatctaatttctcagcaaaggcgtgtcaatggaagcagtgtgtgcccctggcaggccagggcttgtaagacaacacgtgcacctcaccaggcatcctgtcctcttctgccagcaggacccaggctatggccacccagtctggaccatgggggagacaacaggcttaagggatggcctgggtccccaaatgactcacccagcaccattttgtgagtgagaaacaaaattctattattagagcctttacattatggggtctgtaagtaaatacatggaaacctcatcgaatacaagcacgcagtaaatgttatctttcccaaaagaccccaaggttccccaagaaggagcccagggggaatacacacacacacacacacacacaaacacacacacgggcgggaatacacacacacacacacacactctgaaccaacacacacagatacagattttggcttttattctggccatcacacatctacttctaagacaacacagaccggcagtaccccatcccccatgaccactgtcacaaccccaatttcctcagccccctcctcccaccccaccccttctgccaagctccccgtatgggggctctgcctacacctcaccccgggcatgcagcatgaagtgcccgtgcagctcccccaggttgtcgaaggaatcctcacattccgtacagtggtaggttccctcctcctcctcttcctcctcctcctcccgcccagctggtcggccctccccagcccgaggtggttcctcctcttcctccccgagggccctgccttcaggggctggtgcttcctggggggctgtagcagggcagcagagccggcagggtggggttcccggtggggcctccccaaggggtgagcggccacagagctggcaaggctgggccgggggctgggctgcacggggggcccggcgggatgggccaccacggcccccgccaaggcgctgcttcaccttgtagccaggatcatattcaggatcgtcagtggtctcctcttcctcctcctcctcatcttcttcctcttcggagtccggctctgagagagtgtattctgaatcagaggaatgctcggggcctggagggggacagacaggggaagacagtggtatcagaggaaagagggctaggccaagctgtcccctccctgaatccccacattcagacttgccatagtatgacaaggatagcctagacactacccttcccttccccacagatgagtccccatggcacagaacaagactggcacccagtagattccctgtatctttgtgtcaagcaaatgaatgtcttccaagaactgcatgggacaggactgggcacagtggcttatgcctgtaatcccagcacttttgggtggccaaggtgggaagatcacttgagcccagaagtttgagaccagcctgggcaatatagcaagactccgtctctacaaaaaattaaaaaattagccaggcctggtgatgcattacctgtagtaccagcttctcgggaggctgaggcgggaggatcacttgagccgaggagttccaggctgcatttgagccatgattgcgccactcccttccagcctgggtgacagagtgagacctcaccacttaaaaagaatttttttggccgggcgcggtagattactcctgtaatcctagcactttgggaggccaaggtgggcagatcatgaggtcaggagttcaagacaagcctggccaacatggtgaaacctcgtctctactaaaaatacaaaaattagctgggtgtggtggcgggcgcctgtaatcccagctactcgggaggctgaggcaggagaactgcttcaacccaggaggcggaggttgcagtgagccgagatcacacaactgcactccagcctgggtgacagagcaagactctgctgtcttagaaaaaagcaaaaaaaaaaaaaaaaaattatttgattctttcgattgattgcaaaagaaaacaaaaactccatggggaggtggggtgggaggcatttaggaaggacaaagccggagtagtaaaaacccaccagtaacaacagcatccttgctattgtaggagccctgttcttatacattaactcactaaatcctcaacaaccctttgagggtggtactattactatccccagttgatggatgtggaaactgaggcacagggaggctagacgactcactcccctgtggttacacagctctggcaggaaaagctgaacctgggccatggctgacactggatcattttagggagacaaccatttgaaaaggtatttgtgcaaattaaaacacatgcatacacacagatgtacttttatatctgtggccatggagagagagagagagagagttaggtgaattaaaacatttatttataggtaagatatattactgtgatttcacagttatcaaggacaggcctaggacaagtttaggtttaaagaaaaaggcctgtaatctagcactttgggaggctga[133 bp omitted]tctgaggcaggagaattgctcgaacccgggaggcggaggttgcgatgagccaatattgaaccactgcactccagcctgggtgacagagcaagactccgttcccaaaaaaaaaaaagaaaaggggaaaaatttatagttgatatacggaaaagggcgacatcagctgccattatgggggcgcacacacagagtaatggttggggatggggtccctgtgaccacggtgtgggaagtaccagcttcttcggccttggtggtaggagcctgccaaaagcctcaccttgtatccatcccagccccattcctcagtttctcccagaacccagaggatcctgctactgcaccctgtgctccgcccttgctcctgtcatcacagtggccacaggctcttcataccaggctcctcaccttccaacaccccaggcccatacctgcctcagggtctttgccaccctttctgccgatgtcactctccattccatgtctcttctcaagtgtcaccttctcagtgacgccctggccactccccagcactccctacgccccttactctgcttgatttttctccatcttcttttgagatagagtctcgctctgtcatccaggctggagtgcagtggcgtgatctcagctcactggaaactccgcctcctgggttcaggcaattcttctgcctc[133 bp omitted]tcagcctcccaaagtgctgggattataggtatgagccaccgcagccggctcatttttctccatcttctgactcactgcattcaacatttacttgtgtgtttgtttactgcctgtccccgagagctgggactttgtctggttcactgctgtggccccagcatctaaaacacttcctttgtgcaaagaaagtacttatgacatatttatggcatggatatctctgcatggaatttgacaaaccttttctgaggcttcacacacactgttcctccctctggtgggaatgtcctgccctagtttttcccaccatcctttaggacccagtgggaggccttcctctttggtgaggccgtcccagacctcctcatcccaggcagccagtcactttttttaccaccctcctgctgggtccccagcatcaccagcccagaacaggttataactctttccttctgaacatccgtccctgcagctctctcctactagttcctgccatttaacaatcgtttcctgaggccttggtatgggctgttccccactctatccacctggtgaccccctactcatccttcaagacccagcacaaactctgtcctctgtgaagccaccaccctgaagccccaggctcccagccaggtctctctccagcttcccctgccccagcacctcctcctgttactgccctagaagctgactgcagtcagctgccccccagggtatctcccttatctgactgggaactcctcaagggcaggtatgatcttggggtccgcagcagaggacgtgtgggtgagtggatgatagtggccccaagaccctgatctccctccccaaagccttggcctctgctcctcgcccacctggttgacccgttcatttttttttttttcgagagagagtctcgctgtcacccaggctggcgtgcaatggcgtgatcttggctcactgcaacctccgcctccaaggttcaagcgatcctcccacctcagcctcccaagtagctgggattacaagcgtgtgctatcacacctggctaatttttatatttttggtagagatggggtttcaccttgttggttaggctggtcttgaactcctgacctcaggtgatctgcctgcctcagcctcccaaagtgctgggattacaggtgtgagccaccgcgcccagcctgaccctttctttctctactggcaaaactcctgctcctttttaaagccaagctcatgtcacctcctctgtgaagtcctcgctgactccccaagcggtcagtgtctctctcgtatgggctccccggcccctgcactgctctccatcacaccctgaccactctgggcagtggcccccctccccacccactgactatgggctccttgaaggcagggcctgggtctgccccatctctgtgtccccagcaatgctgggcatgagtcagcctcagaagacatctgctgaatggctgcaaaccagaggaaatatctccagcctcaggctgggacccctcccctctctcctcccacctctgacttcataccactcaccctccagagtcttcaatgcccactattacttcacacagttggcctgtgacaggcaatcaggtcatcgtccacggctaccaggtgtttcatgtctactgtgacttccaggaccacaagcccttttgcgcccaccatgtcttcacctaagagatcttcaaagcccagtatgtctctggcacccagtggatcctccatgcccactgcggatcccaagcctcctgcctccttgaagtccaccaaatcagcaacacccaacagatccttagtgcccaccaaaccagcgacatcccgtaactcagtcatgagcccaagcagttccaagtccaccaaatcgaccagtacaaaaagagccccttctaaccggcccagcagcaggtcccgagtccgcagcaaagcaagaacacccagcagggtgagcaccgacaccaggaccagcaaagccagcaaggccagcgacgtgagatgccaccagcggaggggcacacacagccggggtaggacacctggcagaaggggaagccgcagctccaagaggtcacccagcagggccagcactcctggcaggataagaactcatggtgccagaccaggcatggccagcagggtgagaactcccacttcacagcaaaaagggagccggggaaagagttacggccggcctagaaccagcaacagggaaaggagtgacagccagcctagaaatctgagcaagaagagttaccgcccaccaggaggctcaggtatagggaggagttccgagctggctgtaactcccagtacagccaagtgtcaaaccccgactggaattccctccaaggagaagagtgacaacccatctccatcctcatcaaggaaggtgaagagctacggtcagatgatcatccccagtagggaaaagagttacagccccactgaaatgtccagcagggtcaagagttataaccaggccagcacccgcagcaggccgcaaagtcacagccaatctagaagccccagaaggtcaagaagtggcagtcagaagaggacgcacagcagagtgagaagtcacagttggaagagaaaccatagcagggcaagaagtcgcacccggaagggaattctgagccagatgggaagacacagccagtctagaagccacagcaaggggaaaagtcaaaaccaatctagaacccccagaagaggaagaagtcacaactggtctagaaaccccagcaaggaaagaagtcatagccattccagaagctccagcaaagagagagatcacaggggatctagcagccccaggaaggagagtggtcgcagtcaatcaggaagccccaacaagcagagagatcacagccgatctagaagtcccaacaaggcgagagatcgcagccgatctagaagtccctacaaggcgagagatcgcagccgatctagaagtcccaacaaggcgagagattgcagccgatctagaagtccctacaaggcgagagatcgcagccgatctagaagtcccaacaaggcaagagatcatagccgatctagaagtcccaacaaggcgagagatcgcagccgatctagaagccccagcaaggaaagagatcacagccaacttggaagccccagcaaagagagagatcacagacgatctagaagccccagcaaggagagacagtgcagacaatctagaagctccagcaaagagagagatcacagacgatctagaagccccagcaaggagagacagcgcagacaatctagaagccccaacaaggagagagatcgcagccaatctagaagccccagcgaggagagagagcacagacaatccagaagccccagcaaagagagagatcgcagacgatggagaagccccagcaaggagagagagcgcagacaatctagaagctccagcgaggagagagatcacagccgatctagaagccccaataagcagagtggttacagtcgacctagagcctccagcaaggagaaagctcatagccgatctagaacccccagcaaagaaggaaatcatagccaatctagaacctctagcaaggagagcgaccccagtcaatctacagtccccagaagtcccgactggaagagatcccctactaggacaagcagtctcagtcagaatagaacccctagcaagacaagcagccactccccatcaacatttcccagtgggggccaaaccctaagccaggatgacagtcaagccgacgccaccacctctaaggccaccttacctggggaaaggtcttcatcatcttcttccaagctggcgtagcccccagtctcagctggctcacgggtctctgtcatgaccgggggaggggacaggagacaggagcagagcagcagctgagcagcgtccctccccggccagctctccacagccacacctccggccacaagttctctaatacaggatgttggcaggtagagagggatgctggatagggggaaaggaaagacctgtgatgattcaataaatttttacatagcacccatccccaccaagcccaactgtgtgctcactgctggcatggggcacagaggaccccagctctgtccctgactgtctacagggtcttgactgcaagccctgcccctctctaggtcttttttttttttgagacagagtctctctctgttgcccaggctggagtgcagtggtgtgatctcagctcactgcaacctccacctcccaggctcaagcaattctcctacctcagcttcccgagtagctggaactacaagtgtgcgtcctcacgcccggctaattttgtatttttagtagagatggggcttcaccatgttggccaggctgggctcgaactcctgacctcaggtgatccacatgcctcaacctcgcaaagtgctgggattataggcatgagccaccgcacccgtccccctctctaggtcttaatttccgcatgtgggcaacaaggctgccttctggttcttattcagtggggtagggagaggtgacactccaaatattcaacagtggggactggtgtgggcaccaatcagaactgagagtggagcgggacggataccaggccttaaccctttagttgctggaccatggggaggtctggggttggggaagtgttatggggaaaaaaaaccctcaaactgtgtttttcctctactctcacactatcacaacaatcatcaacacagaattctgtgaccaaatgtgtggggctttttccccacacactacacagcagacaacagctaggtgtcccctccgattccattccaacgctgtccccacacccagctaatttttgtatttttggaagagaca[215 bp omitted]caaacttgtctctaaaaaaaaaaaaaaaattacaaaagttagccggtgtggtggcatgtgcttatagtcccagctacctgagaggctgaggcaggaggataaattgagcctggaaggtcaaggctgcagtgagccgtgaccttgccactgcactcaagcctggatgacccatcttacaaaaaaaaaatttttgctggagctgctcacagaactcaaggaaatgcttacttagatttactggtttattatagaggatattgcaaagaacaaagatgaagagatgtgtagggcaaggtataagggaaggggcagggagcttcacgccctccctggggtgctaccctacaggaaccctcaggtggttagctatgcggaagctctccaaacccagtcctcttgggtttttacggaggctttaagacagcagcattgggcatggacttctctgaaaagtgtcttaagaccaacaatcaagaaggtggggaagattagagtcttgccctggggcaggaaatggagggcaggaggaggtcagagagattctgtttcttcagacctgccccaggcctaaggtacacaacattataacaagagactgtaacaaaggctgtaggagttaccagccaggaactgtggatgaaaaccaatatatttatatatataataccacaaggggggtccaaagtggcagttagggacagggagtacttgtgtagcagtgacacaccaacccatctggaagtattttaatatttaaacaattggtatggctatactagtttgtgattatcagccttagttctgtatcaattggcaagatagtgtctaggtttgccacactctagctgtgtagcaccaagcaaagaacttaacttctctagcctgtttccttctctggaagaaaggggcttccaggccttaactcacgtactccccataactagactgggaattatctcctttgtacagatgaggaaacagacacagaggtgataagtgagtagcccaaggtcaccatctggtaagtggatgaactaggattggaagccagacctttcataaaatgatttctcagctcaaaaggtttttctgaagattcagtaggctcactgatagaaattgctggtgtgtggctggtattccatcaagagtggccattactactcccacccctgcccctctataaactccagatgttccagacctctcatctctccctgtgcacacaaggccttttcacatctgtgggtcttagtacacccactgttgctgtcaagaatgtcctcctcctcctttttttttttttttttgagatggagtctcactttgttgcccaggctggagtacagtagcgcgatctcagctcactgcaacctctaccctgcatcagcctccctagtagctgggattacaggcagccaccaccaccatgcccggctaattttttggtatttttagtagagacagggtttcattatgtcagccaggctggtctcaaactcctgacctcaggtgatccatttaccttggcctcccagagtgctgggattacaggcaagagccaccacgcccagccctccttccccctttttggcctggagaactccttttcacccttcaaagcccaccacaaacataagaacctctatacttcttgcccgctgaaatactgcctctgccaggaagccttctgtgacttctctctctccctcttcaccaacggaccgcccccgccccccaccaaccccaccacacacacacaccactactgtcttccactgtactccctgacagtagagaaccaagcagggccagttgatgcagcctcagctatatctcttacatgccaaggcccatgcactggggatacaatggtggaaaatacatggtcccttcaaagtctggatgtcaagtttaatgctggggactaaagagaaaagcttcagattgaaacctggaggtggctggggcaaaggaccattggcatcattggcagggcaacttcctaaagaaagcacctaaatcttggcttttaaagacagatttcataattggcagaggagaattctaatgataccctattgcctacagggccccatctaatttgggaattctactttataccaagataagattgccagatttagcaaataaaaacagaagacatccaattaatttttttgtttgtttttgggtttttgttgcggagatggtgtctcactatgttgcgaaggctgctgtcaaattcctggctcaaacaatcctcctgccttggcctcccacttcccaaagtgctgggattacaggcatgagctaccacacctggcccttatttatttatttatttaattttcttttttgggacggagtgtcactctgtcgcccaggttggagcgcagtagcgcgatctcggctcactgcaacctctgcctcctgggttcaagcgattatcctgccccagcctcccaagtagctgggactacaggcgcgtgccaccatgcccggctttttttttttttttttttttttttttgagacggagtcttgctctgtcgcccaggctggagtgcagtggcacgatctcggctcactgcaagctccgcctcctgggttcacgccattctcctgcctcagccttccgagtagctgggactacaggcgcctgccaccacgcccgacta[174 bp omitted]cccaggctggagtgcagtagggtgatctgtaggaaaggggcttccaggccttaactcatgtactcccccataaccaggttgggaggttagctcactgtaacctcaaactcctgtgctcaaggtaccctactagcccctaggagagcagctgggactacaggtatgcgccaccatgccaggcttaatttttactttttttttttttttttttttttgtagagacgggggtctcactatattgcccaggctggtcttgaactcctggtctcaagcgatcctcctgccttagcctcccaaagtattggtatcactgcaactagcccaaagaattaatatagctatgttccatgtgatatttgggacatacttttctaaaaggttgtatcttttggatataattgtttatctgaaattcaaatttaactagacattgtatattttatacggcaaccacacacctgggacaatcaagacattccctgaagttaccaggagacaatgcccatcagcctacacttttccaagcccacgtcacacaaggccccttccagagtattccagacgtcaggtagggccatcccttggttcacaagtcccactcctaccacgcctatggcagccaaactgaaaggcaaacacagtgctggagaccccacaatgccctgggcctatagcagtcaattcccaagatgccccgcgtgaacacaataggcacccgttccaatgctcgagcaaagagaccagggcaaaaccttccactacgggacaataacggccagttcccacaattcgttgtggcagttcttcccaggatgccttaggcctatagcgaccaccttcccagactccccgtgtggaagcgctccaagcctccaggacggtcagcggcaggtgtgggataaaaggaaccggtctcgacaaggatctgggacactctttcccaggatgcaccaggcctacgactagcggaccgactcccacagcgcttcaaggcggagcgctcggttctcccaggatgccccagggcggcacaaacgcgtagggggagaaaaagaagccctcgggtcaccacggccccagaccgccggctccccggtgacgggagtcgtcgctcccatcatgcagcggggccgtagcgcccgcttcccggcatgcctcgcgcacccctgcccgggacactcaccggcgccggcggcccccgctccggctctgcggcggcggctgcacgcccagcctctgcgcctgcgtcgcaagtagggtaggacagcgcgcagggggcgtgaagagcctagggcgcttgcgcggcgagacggactagtcctgtagcgctgtgggaagaggggctatgcgcgtcgggccgtcgacgagacccgcgcggggggcgccgtgctttgcccctcgctgcctgggtttacttggtacagcccgcggcccaaaggaacaagaagctgaagggttcgcgcgtgcgtgtgcggggcaggaacgcgccttacaaaactgggatgcgctgggggtggagggcgctagttcggactggatcctgggcccgaggcctgcttatttgcataatcctagcgcgggacaatgaaaggcctcccgcactggaaggagtgatttgcatattccccggaggggccttactccagagcgcagtgattagcatatggcgggggcaacctgagcaaagcgcatgcgcgcagggactgcagactgacgcgaagtgggtagccttgtcttcgtaggggatcagtttgcatcctgagagagggcacgagggccaggacccctcccaaccaggataaaggtttattgatctcctaggtgtcaggccccatgctggcggattctgtggtttctgcagtgaaccatactcctgtactcacggcaccccagtcgaaggagatacgcacctaattagacaactactacccagaaggtcagacctggagtgaggaacacagggggctgtgggagcctaagaggcgcttgccccggcctctggttctagaaagacttccaggaggtggtgatccttaagccaagtacgaataggagccaactagaatgggaatgggtctggcagaatgaactgcaagcgccaaggcccagaggccaaaaaaaaaaaaaaaaaaatagaagcgcatgttttgattgaggaagcaagagcagcttagtatgcctagaacctaactggagacgggaaatggttctatagacgatgttagagttcaactatggctacattccagtcttcctgtaagtgactttgtcacattctggcttaaaactcccccaaagggatcccattaggaaaaaaaaaaaatccaaaaatctttatcatggcctcagggctatacacctggtctggccgtgcttatctttctgaccccacctacttcctcctccctccatttctgtccagctccaccttaccccaaactctttaccagctcgggcctctgctcttgccgttccctccgcctgaaaatgcttttccctctgacctttgaatacctactcttgtgctcaccattcatatcttggtacagatgtcaatctgagaggcttttcctgatctctccataatagcacttacacatttgactggagttatggataaatcgggattggccatgagttggtggtggttgtaactggcatgaagagtacatggggctgggcgcggtggctcacgcccgtaatcccagcactttgggaggccgaggctggtgtatcacctgaggtcaggagcttgagaccagcctgggcaacatggtgaaaccctgcctctattaaaactacaaaaattagccaggggttatggggggtgcctgtaatccttgctacttgggaggctgaggcacgaagatcacttgaaccctggaggcagaggttgcattgagtcga[137 bp omitted]actaaaaatacaaaaaaaaaaaaaaaaaaattagccgggcgtggtggcaggcgcctgtagtcccagctactcgggaggctgaggcagga[133 bp omitted]tgggtttgaagttttccataatgacaatggcataccacatcaccatactctgcatttatattaatagttcttatcacaatctgaactttctttgcttccttgttttgagtgttttcctcatgaaagcttcatgagggtaagaatggagtcgccctttttcactttgggttctcaatgcttagagcaggatcagatttcagattagtgtagcgctgtctttaacacttaacatttgcctgttttattcaccatggactctagaactttgagcagcacctggcacatcgtaagaggttattttttaaagttagaataatacatctaaaatgtacatgaatgaatgagaggcctgggatgccagactaaagagctttgacttggtctaaaggtgatggggagctaggcaaaggttttgagagtttaactttaattcaaagttcccttggagactaatgtctggggtagggggaagccagggtaagggtccgggccatggaatggggtagctcagtcgctatcaaaaagacaagactgtgactatttggctgaagaaatggccaaacccaggtttctggggaggtcgaggtaccctcagtgaggtcaggaccttctcctggcctatactgtccaccagcaaccatcacactcctccctcccctctcccttagttcccctcccaatggtacagcccttgacagcaggacagacacacagccaccccaaacacttgttctctcctcagtttaatggtggttagtgagattgccaaaccccctccccattcccctccccaccccgtacaaaatgtgtgtgtggttttttgttttttgttttttgttttttaacaagaaaaagggggcaaaagccaggaatggggagaggggggtgcaatctgatattttcatacagacttttgattttttaatatattatatataaaaccatgaagaccacgaatcctccccaaactcctttccccctccccggggggcctggaggagagatggggaaggcccccccaggagtgggtggacagagagacaaatatggatgggacagacgttgggggagaaggtagagagaaggggagcccaggaacctggggaagggggattggagaaaagggttggggctgtctccctcactgcccccatcaaagttatgacacaaagacacagaatccctatttccacgccctccccccacccatccccccaccgtgcaaacatggctttgcaaagaagtgcccagagctctgtggaactcttacaatggctggcatggggtctaggacccccaaagaaatctgtgttccccttccctgccccccccacccttcccagaaactgaccccctccccacaagacctggttttgtagcctaggggccctggccttcccccagttatcttcccccaacccaatccctactgccctcactggacttggggggtctggacctttggcccctgccccctgggggacccagacctctgggccctcacttctggcccttacagagatccaggcatccaacacccccatccctgcccaagcgtctgaggtgttagtggtggggggagaagcccaccatcccagactctggtaaatgtctttgctggttccttgcagctggcagtgggggggaccccagcccaggcccaggcctaggcctggggtggggatagggtcagatgaagaattcctctttcctcttgtgtccgtcgctgccattgaggaaggcttctcttgcttctccctgttcatccaagccactggcttcgtgggtcagataggaacctgagggggtgacagacccccggggcaggggggacatatttgtggatccaggagttggacagaagtataagggaagagggagacagacaagacacatgccaggcgaaggaagagggagaaacggaacacacagggagaggcagagaaagaggtaaacagtggcagagaaagaggtaaaagcagaattaggaagactccaaaagctcaccgaaagtgccacccttatcctttctcttggaggtatttccttgccctgctcccagcgaattcagcaattaggaaaataaattgttttattcaaatccatgctctttttttcccctaattttttgtatttttagtagaaaaggggctgcgccatggtgcccaggctggtctcgacctcctagcttctcaagtgctttatccgccttggcctcccaacgtgctgggattacaggcgtgagccaccgcgcccaaccgcaaatctatgcttttaattcagcttctaaattctaccccttttcgagtattgtgccgaaagccccgccccctttgtcatctccgcccccggtgcggcgggatttggaatccagagcctaggctccgccctctcgttaccctggctctaggccccgcctctttccgagccctacaaccaaccaaccgtagagtccaggccccgtcccactcacccttctgccgtaccgagcaccagaccatgcccactagcacacatatgatcagaaacaccagcagcgccaggatgccgcccacaatggcatagggaaccgacgtctgagcctctaccaccgcaccagggtctgccagagggacacggcacaggaccaggtcatcagaggacgatcccagtctggccccatcgctgccaagcttttaagccattctgcacacgtctaaccgtgcccttttatgtgccacacccctcaaaaattactgccaccttgtagtctcttctctttccagatgcttgttggtttgtacactgcccgacccctcccctgagtcatgttacattttccttttctttttcttgttttcttttgcagagacgggggtctcactatgtggcccaggctgatcttaaactcctgggctcaagcgatcctccggcctaggcctcccaaagtactgggattagaggcgtgagcgaccgcacccagccatcccttttcttttgactcaagtttcttcctccactaagaaacagagtccaagaaacaggtccaagtcccttcccaccttgtctaaaacgctccaagtatttaaagtgctgggcccaactaccaaaatttctgccccaccgtcatagagctaaacacagaacagctgtgtgctagagcccattccaaccaccttacatatttagttcacataatcttcacaacagccttgttatataggtgctattgtttatttccactttactgatgggtaaactgaggcgcagacaggttcggttacctgcaatagaatgcagccaacccgaatttgagccccgcgggccagtctggtcccaaaacaaaaagaactctgttggctgccgaacccctgagttatgtggcctctttgctcaagccccgcccccgccacctggcgccccgcccccgccctcagtcggccgcagcctgctctcaccgtagaccacaagtacgtagagcgccctcgcatggccgtgcttattggacgcctcgcaagtgtaggtgccgttatccgcggataccagacccggcagcgtgagcgtctctcccacggcctccgccctctccggcaaagactcattcccgcggttccagcggatctggtttggcctgggtggggataaagtatagtgagagttaggaaccgaggtgccagcacccaattctgacttgtcaagaatctagacatgcaactctcatcccgcagggacctccaaataagaggcttcctgctatctctttcctttctggaaaaccaacagtcctgggcctacttccacccatcaccaaggtctcaggaattctagcccaggctgaacatggtggcttatgcctgcaatcccagcactttaggaggctgagacgggaggactgcttaaggccagcagttccagaccagcctgggcaacacagggagaccccgtcactacaattaaaaaataataataataataataataattctagccctcccacgccattccatcctcagcaaccaggagtctgaggctgcacagcttcagtattggggagtctgagcctccagattcctcctccctcaggatccaggagtccaggtcccagatccctattcgtccaggtccccagctctctcctcctcaggacccaggaatccaggtcctagctccctgtttgtccaggtcctcagctctctcctccttaggacccaggagtccaagtccctggtccctgttcttccaggtccccagctttctcctcctgaggacgcaggaggcccccagagctcacctggggttccccgtgacagcacacgtcaacaccagcgtgtctccctccctcaccacagcttgggaggcatgaatccgggccgtgggggagtctgttaggcaaaagtaagaggagagagtagtttccaagccatcacgcaggacaagggggaccctcgcgggtgcgggtggctggcgttgggatcccttgggtcctggcccgccggtcacttacactgcacatccagcacgtactgcgtctgcttgctgtgtccggagggcagcgcctggttctgcgcctcacagatgatgataccaccgtcgtccttacggtccacacgaaaccgtactgtgcttgccacgctccagaccttgccattttcctggctgctgctcactcctgccacaccccggtcagacactgtcaggccacaattccggctccatccacccacccacccgagccaacgccaaagcaggctatttgccaagctccaccccttacccacaggccccgcctcttgtcctccaagctacgcccctcccctaaccaagcccacgtgcctcctcccaaagctcttccctctttcacgctcatgctttctcgtctatcaatccatttaattgctatatatataaaaacataaatttatatatatacttagagacagggtctcacaatgttgggcaggttgaactcctgacctcaagcaatcctcccatctcagcctcccaaagtgctaggactacaggcgtgagccaccgcgctcgacatcaaccactacatattgaatgtccagtgtctgtgaaaacctgtggctcctctccacatataaacaacctctcctaagtcccacctcctccccatcccttgtcagcactcggcccagggtacctttcagctccttgcggtcccggtaccagcgcagggtggcagccggacgggaccgcggaacgaggcagctgagctccacctcgccgccctctaccgcctgctcccggacctccaccacaggattctctggggccactgccgcagggagaagggaagtaaggggttaaagaaggcacgaacgtgggctcaaagcgatcgagctgcctgttcccagcgaccatagggaaccagggtcccaggtggcaggggtcaaaggggagaggtcaggagccagatgcccatccaggatgttaaaaatagccatggtctgaaagtctcaggagaagagagaagcagagaagaaaggaggagaggatgcgtctgacaagggggagggcgttacctagtaccgtgagcgtggcaatctggtggtgggtgtcttctgtgtagagctggcagaaatagcccccctcgtcctccaggcgggcatctgagagccggatccgcacccggcgtggggagaactcctcaagctggaaacgctcatccttcaaggctagagagagtgagggggaaggtgtgaatttcgggagtcctggcctcacaagtcccacccttccgacaggagcttagagtccagccctctgcctcttttctccagccatatctatgagtctgaggtgtccaactatttactcccttgaggacccagcattattcaagtcctcctgcctgcaggaccagcagtccgggaccccagccctttcttctccgagacccaggagaccaaactctcaggtgtgtcctctttcaggacatgggagcctgggccccagccctctcttcctttaagactcctgagtctggtccccagcactcaccacgggtgccattgaagaagagggtctgccgggctgggttctggatgacaactatggacccatcatactggtgcagacggcaggtgatctcagccaccccaccctcagccactgtcacgttctctgtctgtacttcctgtcctgcccctggacgattagacaaagagacaggatagaagacttactgagagctgcaattcaattttttctttctccctcttccccatccaaacctccaatccctctctttcccctcattcattccattgcactgaacatttcctgcaggctagagtccaggacagggaggaaatctgctccctactctaaaagagctgcagtcaagatttagtagaatatgctctaatgagggcagcacagggcacactaggagcccagagcaagggaggactattatagaattgcctagagagatgggtagccagagagggctctgcaagaaagctccattggatctggatcttaaagagtaagcaggaggctgagcgcggtggctcatgcctgtaatcccagcactttgagaggccgaggtgggcggatcgcaaggtcaagagatagagaccatcctggccaacatggtgaaaccctgtcactactaaaaatacaaaaaaaaaaaaaaaattagctgggtgtggtggtgcgcacctgtagtcccagctactcgggaggctgaggcaggggaatcgcttgaac[138 bp omitted]tgtgttcaccaagcctcatctttcacacctgggcacatgttgtagcccgtttgcaaagatagccgtaatattctcctgtccctggacatgccctttgcaagttgattttgccattcctcccattgagaaggcactttgtcccctactagtctgggtaagccttgagagttgctttgaccaatagaatttgctagaagtgatattgagcctaggcctgaagaggccttgtagcttccactcctgccctaagactgttgcatgaagatacccagactagtgtctttgcagatgaacaatcatggtgaaagagaagcccagccggcagccagcaccaatcgccagctgtgtgagtgtggccatcctggatcatccagccccagctgccccaccagctgacagcagccacacaagtgaccccagttgagaccaataaaagatctgcccatctgatacagcccaaactgctgaaccccagaatcatgaacaaataaggtggtggttgttttaagctcctaagttgtgggtgatctgttctactgctaaagttaactgatacaatacataattaggctatacttcccagcatcctttatagttaggtggggccatgtgaccaattctggccaatgggatgtaggtggaagagaaacacctcttgcagcctgacccatctccctcataatccttcacactggctgaacagagaggactccaaggagcctagaggagggcagaatcacaagccagaaggaacctgggtctctaactgactgtcccccatgacccgcctgtataggactgtgatatgagcaagaaatatacctttttgttaagccattgagatttcaggggtgtctgttacagcctttaacctaccctgattaatccatcagaaaaacaaggtggggaatctagaaccatcagagaaaagcatttaggaaagctgaaagccaagactaatcatcagcattaatatcatcatctgttgtcttcaaaataacaataacccccatagctaccaattattaggtacttgcagtgttagtccctgtgctaagggcattacccatataacttacctttaatcctcacaatccctgtgtaaggtagacatgattattatcattattattattattttgggacagagtattgctctgttgcccaggctggagtgcagtggtgtgatctcagctcattgaaacctccacctcccaagttcaagcgattcttcagcctcagcctcccaagtagctggaattacaggcatgcaccaccatgccgggctaatttttatttttagtagagacagagtttagccatattggcctggctggtctcgaactcctggcctcaagtgatccgcctgcctcagcctcccaaagtccagggattacaggtgcgacccaccgcgcctggccaattattattattatttttaatttgagacaaggtcaggctggagtgcagtggcacgatctcagctcactgcaatgtctgcctcccaggctcgagtgatcccacctcagcctccccagtagctggaactacaggtgcacaacatcacacctggctaacttttgtatttttttagagacggagtttcaccgtgttgcccaggctggtcttgaacttgcgagctcaagtgaactgcctgcttcggcctcccaaagtgctgggattacaggcatgagccactgtgcccggcctgcgctattattatccccattttgcccggcctgcgctactattatccccattttcccccatttccatttttcttttcttttttttttttttttttttttgagacattgtcttgctctgtcgcccaggctagagtgcagtggtacgatctcggctcactgcaacctccacttcccgggttcaagcaattctcctgcctcagcctcccaagtagctgggattataggcacctgccactgcacttggctaatctttg[155 bp omitted]gcccacagagatgaaatgacttgcccaagttcacagccaagagtggcagtgccaaaatcttcgtccaaatctctgattctgtatcctgaatctgtatatccactcctggctgtctggattaagtgtccatcattggcagggggttgtgagagccgcttgtgatgggcctcgaatgccaacctaggagatttgctttcatcctaagggccagtgaaggttttgaagcaggaatatgccatgattagatctggctatttgtctttaagtgctggataactatccatgtcttttacattcaggtgctgggttgcattcattcaggagtatttcctgagcatcacgtaggttttcaggggctgagtagtcagagatgagttagatgaggtccctgccctttaagatttatgggaaggtagga[131 bp omitted]aaaccccgtctgtactaaaaatacaaaaattagccaggtgtggtggtgggtgcttgtaattccagctactcaggaggctgaggcataagaatcgcttgaacctgggaggcagaggttgcagtgagccaagatcgcgccactgcagtccagcctgggtgacagagcaagactccgtttcaaaaaagaaaaaaaaaaaagaaataaataaaagaaagtgttatgttttctgtaagagggtaggtaacctaatttggaagttgaggggtagaaaagattatttctgggggatggagacagagacttctggcttcctattctgacatccatttttccctttctcctcagtaaaagaaaagaacactggttgtattttatggttgcactatgtccagcagaaaaaggcattcctcagtctccttgcagcaaggtaaagccatctgataaaattttgtccagttggatataagccaaaatgttgcgtgacaattttgggaggacttcctgaaacaggtggacaaaccctttttctactgagtcacctttgtgccacctggaactaacagtgtgacgcgtggaatttaggcagccatattgaaccatgaggacaagagcagtggggatggcggaaccaagagctggaaggtgcctgagtctctggtgaagatgtggagctgctgtaacagccctcaactcctagttctggacttcttttatgttttagtgtaacgctttgggtatttttatttttttaatttattttagagatgaggtctcactatgttgcctaggctggactcaaactcttatgctcaagcagtcctcctgcctcagcttcatgagtagctgaaactatagcactttgggtatttcagccactgtttgaggtttttctagcacctcctggaatatcaagcttaacatgtccaatccttgccccagatattttcctccccaaattttctcaatctcaataaatgtcaccaccatccacctggttgctcaggtcaaaaacctagaaatcattcaagttctctccctttccctcatccccaatatccattccatcagcaacatctgtccattctacctccaagacatatcccagatctcatcacctttgtctgcctctcctaccctcactctcatccagcatcatccctcacctggactctgcaaaagcctactcgtgggtctgtctgcatccctgtctgcctcctccagggccattctccacccagtggccggatcgatttttcaaagaggtaaatcagatcaattcacctttctgcttaaaaccctccgagggctgcccgtaacatgtagaataaaatagagaccccttcccggggacttcaaggtgctatatggcctggccccttgctgaccttacttcactctgggctcgctagccttgctgtccctcaaacatgctgagctcgctcccaccacagggccttttcccttttcttccttctgcctggaatgttcttctccccacctcccaagccccatcttcccagggctgactcctgttcccatttgggtctcaaatcatatcagtaccttctcagagaggccttccctcactgctcatcccttcacctttagaacactttcttttcttttaagagacaaagtcagcccagtgcggtggctcacgcctgtaataccagcacttttgagaggccaaggcgggcagatcacctcaggtcaggagttcaagaccagcctggccaacgtggcgaaaccccgtctctactaaaaaaatacaaaaattagctaggcagtggtagcccgggctactcaggaggctgaggcagaattgcttgaacccaggaggcagagg[133 bp omitted]tggctcactgcagcctcgaactcctgggctcaagccatcctcccacctcagcctcctaagtagctgagattataggctcctcccaccacacctggctaatttttgtgctttttgtggagacacagattctccatgttg[133 bp omitted]ctatgaagatttcactggaattatcagattaatttgcttatttgtttactgtctgtttgtcacccatgactggaatgtatactctaggaaggcagggatataatccaatgggtttactgctgcacccctagtacccagaagagtgcttggcacctgataagtgtctggggaacttgctacatgaattacatgtgtcagatgggatatctgttcgtctttcttctctcttttttctttctctctttctctctctctttctttctctttctttcttttttctttttttgagataaggtctcgctctgtcacccaggctagagtgcagtggtgcaatcatggctcactgcaaccttgaacatgtgggctcaagcgatcctcccacctcaggctaccaaatagctaagactacagaggtgcgtagctatgcccagctaattaaaaaaaaaaaaatttttttttttttttagagatgggggtctcaatatcttgcccaggttggtcttgaactcctaggctcaagcaatccccctgccttggcctcccaaagtgctgggattataggcatgagccattgcagctggcccagacagaatctcatttcagcccgacaactttgtgacatcattattttcatcttaaacacctaggttgatcccagctcaaccacttgccatctgtgtgacctgtgggcaagtgaccttacctttcggagcctcagttgccccatctataaaatgggaatgatgccagtgcctgcctcataaggatgagccccgctcctgaagctcagggagccctctctgcaaggctgttttagtgcaacctccggaaacatgcccatgcatgtgaaaactggcatgcacattctggtgcttttaaaaacatctcgaagcctatccacagatcctggacctcaagactggttcagtgctagccccccattttacagatgtggagaatgaggcttagcgggtcccaggcaagtcagtggcaaaactcaccatctcctgggagccatcaggttcctctggatctgcccccaccaaatttatcccctgctctctgcttgagggtgcacatggggtgagggtgggggtcttttgttttactccctccccctcctgaggagtcagtaaccaacagtgtctgtgcctggaatattaatgtctcagcagcttttgtttggggggttgggggtggtgggggcgggactttctggtcagagaggggctgagctttggggactgaggcactggccctttaaactgtgttgacagccaggagtcgtcatggggatggtgcttggaaaaggggacagggagggtttgggaaagagtggcggagcaggtaatgcgtaagacccaggaatccagcccccaactacctcctctcccaggacccaggagtctaggctcccagcccctcctccatcaggttccaggagtctggaaccccggcttctttccgccttagacccaggaattcagcccccaaccacctcctctctcaggttcccgaaatccagacccctagcccccttctcgatcaggacccaggagtctgggctgtcagcagccccttccttcaaacctaggagtcagagcccccagccctctcctagcttagacacaggagtctgggcctccagccccctcctccttcaggacccaggagccaggggtccagagtacacagctggtggatgtttccacggagactaagcagggtggggggagcgcttcctgggtcctgagtcagcgaatacccaagggagtctcaaggtcatagttccgggaaggtcaccaccaccccctctgtatccgctccccagggggctcctggcatcctgcctccttcccccttcctcccttagggaggtggtacatccctgcgtcctgactgaacccccctcagccccccatcaatggcggagtccgaacatcctcgcacaaagcgtcaattcttccccagctcagccttgtgaaggcgcctgtattcgcaggacctaggcgtcagggtctcagcccctcctccctcagaaacctgcagtggaatcccccgcctccagccccttcctccctcaggacccaggagtctgtatcctcatcccttcctccctcaagacctaggagtgtggactcccagcccccttttccttccggacacaggagttccagccctcggccctctcctctcttaaacccaggggtctaagaccccagcctcctcctccctcaaactcaggagtctaagatcccaggcccctcctccctcagactcaggagtctaagatcccaggcccctcctccctcagactcaggagtctaagaccccaggcccctcctccctcagactcaggagtctaagatcccaggcccctcctccctcagacccaggagtctaagaccccagcccctcctccctcagactcaggagtctaagaccccagcccctcctccctcagactcaggagtctaagaccccagccccctcctccctggacccaggagcctaagacctcagccccctcctccttgagacccaggagtctaagaccctagctccctcctcctttagacccattagtccaggcccccagaccctcctccatcagacccaggagtccaggcccccagcccctcctccatcagatccagcccctcctctcctgaaaacttttgactctaactccccagtcctcaacccctagaagcacagtcctgcctttcctcaatcctctgtcccctcccatctggggacctaggcatcaggtgggggcgtaggggtgagtcagcaacctcacacacaaagtccccgctgtggcccccacattcctgggatattcgggactccctggattccaggcctcaggcccagccagggagtggggagtcccccagaggtcctccctgggtgtggggtacgagaggaattcctgctccgggaagggtgcaggcctgcactgagctccctctgtccgaacctccacgcccagtgccctctattcaccccctcttcccagaagagcccaggctcagcacctgccccttgccccactgggtgcccacggaggagcctgcgtgcctgctccctatgggcctggggtctgcacaggcggaaatcagtgggtgcttccgttctgatgccacaggccattggatgctggcgggtctgactgtctccaggccaccccccacccctcccagagagagaaagctgcctttgtgttctccaagatggggacaggccaggctcgcacgacattaacccagccttaggccccagccctgctgtgtctaaggtcttggaatccactgcagaacctgacccccacccccaggctctggggacacaggcgcctggctcatgggtgggtgggtgggggggtcagtgatagaaacctccaaaacctgttccttggggtgactcacaatggagggagggtccccctattctcaagagtggctggtcagaattttagcaggaaaaagtgagtcaccctgggaaggaaacattatttagggaccaacaactgccccctccacaagacccctcaactcctaatagcctctctattctttctttgtattggatatctgtttcctctcctcctttctgttctacccagtttctggctgcgggtcccatttctgcctgggtgcatccctgggcaggcaacccatccctccctcttgctttctctcctctgcccaccctggatccttctttgggcataaatctcatcttcttctgctatgctcagaagatgaatgaaccaggagagagagaacatgtttttaaaatggcgcaaatgcaccccatctcccccgattcctgctggctgggcaaggtgagagaggaagaagtgactaagagagaaatgtgggaacaacagataccccctaaaatgtggtagccaaggccactgagaaatatccaatggaaaggagagcaggaagggccctccaagaccacatgctacagcctcctaccccatgctttacagaacgggaaagtaaggcccagagagggacaaggactgatgcaaaattatactaaagggtcctgggtaaggcttggacccaagttccttagctcccagctgagagctcttcccatgacaccaagctcagtttctactggtaaaagccacatactatttactttagagaaagtttacagagagggttagggtgccaggaagcagtgacttggaaatcaaacgagggacagggctgtagacctaactcccagaagcaccagagaaaggcttttgcacggggcgggtggtcaccttaagctatattctgatcctgagaattcaaagtctgatgattctaagctgtcaggattctaaatgtcatagatgtcaagatccaggaactccaagacatcaagatttcacgatttttaagacgtcaagatgctagcatgctaacaccatcacggttctagaactttaaaggtgtcaagattctaaagccttctggattctagaatcctgtagatgtcagcattctaaagtaccatcaggttctttatttactggattcattagttccaggattctatgagcctggtgtttagcctaaaaaataaagataaattaaaattgatggaaatgtcactgaggtaccaaagttctcatctgggaaattgtggcatgtctgttgtaaagaaaggaggtaatgatgcaagttctaaagcagtcacagaagactagagaagaaagaaagacagtgagaggacagctttgcccctcatcctggccgaggtgaggatggctctgcctcaaaccctggagtggggaacatgtaaccgcactcaacttgccagaaaccccttcacggtctgagctggcgttccctttcatgtcactgagttcaacatcctcactttacagaaagagaaacagaagcctggagagaggaaggtgtttaccattggctgcgatggcaaatggcaagagccaagatttaagcccaggccgccagccccatgccacctggttataactcctctcaccaatctctgccgaacacccagccctcctgcttctgcctagccaccttccaatcctctgttccttccaaaagtggccttatccaccagggaggggtgacccgtggcaggttcaagacttacacagtgtgagagtgtgtgtgggtgacatttcctgaccttgtccccattctcagggtcacccaacctcgggggtctccagcttctcacagtgtgtgatgagggtatgtggatggctccctggatgtcctggacaggggcttctctgtgagtcaagcctgggtgtgtgaatgggtgagcagggtttggagaggcattcgctgaatccacgtgtgtgcctacacgccaaggtcccccattctcacttccccacacacatgcacacagatgttcccctccagggctctttagaatgccctgcctgactgaattcctcttcaggggcacagagggatagagagagggaggaaggtaggatgggaatgggagatcccgggatggaggctgtaagcgtagagagaggaggcacagcagaaagacagggatggagatagtgggacagagaagggggaaagagacaggtgacagaaagggttagagaaacgagtgacagaaagacaggggacagagacaaggggatggggcagataggggacagagaaaaagggacagaaaaacaagggtgacagcgagacagagacagggaccaagaataggggcagagagggagggcagaaatccgggggaaagagaatagacaggatgatggaggggacagagtgacccaggaaaaggggacagagaccaggggacagaggtaggggacaaagacagaatagatgaggaacaccgaggcaagaagagagggagacagacagaaggagggacaggacttcgagactgagggatagaggacaagggtagggggacgaggagccagacgggggggttcagagacgggcggacagagggacgcagagactggacagaaggacagcgggaccggcctggggagggcggacttgtgtgtgtaggggggtctcgggccctttgtccccgccgggatccagcctgcgcgggtgggggggctgcggcacggcggccgggccccgcgccccctcccccgctcgtcgctcccggctcccggcccgcgctgcgctttgtcccggggagggggcccggcccggccccgcgcgcattgttcggcctctgcggccccgaggctgccgggctgtcaccacagcgcgccccccgccccagcccggccggccgaccccggcccccgaccctacctggccccgccgcggccgcccacagcagcagcagcggccactggaagcgccgggcccggcccatggtgccgccgccgccgccgccgccgctcgctcccggcccggcacctgcaccgcccgcgccgcccgccccgccccccgcgccccgccccctgcccgcccgggggcggggcgccgaggccggggcggggccggggaggggagggggagacggaggagaggcccggagacaatcggggggacggcacggtgggggaacggtgcggggtgcgaaagctggagaggagaggggtgaggagggcgggaaggggtgcgcgggagggcgacagcggcgtgggagcaggtgggggatctcggtgagcgcgggaaatggagggtgttgggtgagggtgctgcgtgcgggcccaggtgctgcgcgcgagggtgcggagttgctggcatgcagggtgcttgcgctgcgcggaggggagggtggcagggtgttgctggaggctgtgcgagggtgggggcgcgggcgtcgtggggtgcggtgtgtgcgaagggagagcgtggccagcgtgacgggggagcgtaagggagggagtgcgacgtgggaaaggtgagtgtgagaggcgtgctgcgggcaggtgggtgtctggagtctagcgagaggctgtgagctgagccaccgggacaggggaggctgcagctggaggtccggagggtccggaggtcgaggcaggtcaaggatctcccagggcagggcgaggctggggctcaggagtggggtggggtcagttccctccctccctctctcctgtcctgacctgaaaaccccgtgtttccgcgtcattctccgggaggggccccctgaaagtgaactaactggaaggaagcctgaatcctgggtcccaggagggagaggctcctgtgaacaccttccaagccctggcgtcccctctcctccctgctgtctccctgccccagcctctctccctctctctgcatgtatttgcctctgcccttcctctctccccatctttgagggtgactcacccctccagacttaggtcccttctccctcctgggagtgggtttccctgagcccacttctgtgacaccctgtagacctgatgcgggatcattacctatgggacccagaaagagtgagaaaccatggaaagaaggcctcgacctctctcatgcccatttgtcaggcaaactgaggtccagaagtgccaattatgaacatctttccttcccccctcccccctccccgcccagacggagtctcgctctgttgcccaggctggagtgcagtggcacgatctcgactcactgcaacctctgcctcccaggttccagtgattctcctgcctcagcctcccgagtagctgagattacaggcgcccgccaccatgcctagctaatttttatatttttagtagagacggagttttgccatgctggccaggctggtcttgaactccttacctcaggtgatccatctgtctggcctcccaaagtgctggattacaggcgtgagccaccatgcctggctgaaaatccttactttttattccgactaaaaaattttacatccagtcccacaagggacttcagcttcacacaccctttctgtcctcagtacccagctcccagtatcctttctgacctcaaaaccatagctaccatcaacccttgtgtcccaggaccatggctcccagtgtcttctctgtcctcagggtccaagctcccatcaactcctgtgtcctcaggaccacggctcccagcatcctctctgtccttcaggtccaagctcccatcaacccctgtgaagcaggaccatggctcccagcatcctctctgtcctcagggtccaagctcctatcaactcctgtgtccccaggacgatggctccagcaatcctctctgtcctgagagcccaagcttctaactgcccctgtgtccccagatccatagccctgagcaacttccttctttttcagtcctcagcttcccagcttctgtagacttgggaagagatagtctctaatcctctttccagggctcacattctgtgacttttgctagatgggagaggaatgtttgatctgcctttggaatactggtccaaggggtaactagtagttgccttttcccgcaggagccaataggcccgctcactctgtgctctgacagatgtctcctgctccagctgaaggggaaccttgggagatgttggtttggttctcacctgtcatccttaagtcccaccattccatgtgaagacatcacaagagtagtggtcctgacgggcgcgttggctcacacctgtaatcccagcactttgggaggccaaggtgggccgatcacttgaggtcaggagtttgagaccagcctgaccaaccggccaacatggtgaaacaccatctttaccaaaaaaaaaaaaaaaaattagcaaggcgtggtggcacgtgcctgtaatcccagctggtcggaaggctgaggcatgagaatcccctgaacttgggaggcagaggttgcagtgagctaagatcatgccactgcactccagcctgggtgacagaatgagactcagtctaaataataataataataataataataataataataataataataaatagaatagtggtcctgtccccatcctacttcagggtaccctgtccattagggatttagtgcaagtgacagcaagtgcaacccaactggtttgagagaaagagaactggttcacacataacaaaaagtccttctatggctggctttggcgaggtctgtcaatctctgtcctaaggatgcatggctcccctcctgtagcaagatggctggcagatacccctggggccagattcatatttggggtgattaagattctgcaagagagagacaacctttatttcacacagcttttcaattgttgcctgtccctggtgagactcggagacctagctcttgcctggtttctaaactttcaataacaccgtttttgcttaagtcagcacaaacagattttatttcttgcaagcaaagattcctgaacaacaacttcagagccgttaacaatgaggtcctgatcacaagctatggtataggacgtgagaaatttgtccctagcctcaatatctgctggagggcatcatggaataagtatttctatcctctgatccccactgtagggcatcatgggatatataatcctaaccttcaatctctgccatagagtttcataggcaatgcagtcctagcctcaatatgttgtagggaattatgggaaaggtgaaattatcctcaattataatacagagcatctcagaaaatgtcgttttagcctcatctctgctgtagggcatcatgggagatatacttctggcccaatttttgttgtaagttgccatagaagatgcagtctttccttccttcccttttttcttttctttctttctttctttttttttttttttattatgtagagacagggtctctcgctatgttgcccaggctggtcctgaactcctgggctcaagcagttctcctgccttggcctcccaaagtgctgggattacaggcaagagccattgcacccagtcccttctctcctttctttcttcatcacctgccatattccaggcactaggaataaatcatcaagtaaataaacggccttaccctccctggcaattataatggggaaagttagctaaaaacaaacaaaaattactgttccatttaaccatcgctgaataacaaaataccccagaacgtagtggtgtgaaacaacaaccttttaattttatgattctgtgagtcaggaattggagcaggattggtgtgtatctgcttcatgatgaactggagccaaaaatgaactagctggaacagctggagatggaggggaggggcatcaagggccatatatctaaggctggtggttggtgttgtgggttttgaatagtgtcctccaagtaaaatatatgttgaagttctagcccctggtatctgtacatgtgaccttatttggaaataaaatctttgcaaatgtaattcacttttttgtttgtttgtttgtttgctcgagactgagtctcgctctgtcacccaggctggagtgcagtggcatgatctcggctcactgtaaccttcacctcctgggttcaagcgattctcctgcctcagcctcccaagtagctgggattataggcacgtgtcaccatgcccagctaatttttgtattttcagtagggacggggtttcaccatgttggccaggctggtctcgaactcctgacctcaaatgatctgccacctcagcctcccaaagtgctgggattataggcatggggcactgcatcctgcccagatgtgattaacttctaacccctggtatctttgcatgtgactttatttggaaataaggtgggtttttttcttgtttttttttttttttttgagacagtttcactttgtcgctcaggctggagttcagttgcataatctcagctcactgaaacctctgcctccgaggctcaagcgatcctcccgcctcagtctcccgagtcactgggactacgggcaagcgccaccacacccggctaattgttgcagtttttgtagagatggggttttgccatgttgcccaggcggtctccaattgccaccctcaagcaattcatccgcctcggcctcccagagtgctggaattataggtgtgagccatggcgcccggccagaaagtctttgcagatttagttgaattaatgactaaatgtttccatgctgagttagagtgggctctaaatccaatgattgatatggggttataaggagagatatttggagacatagccacagtcccagggaaggtggacattggaagacagaggtagggattagagtgatgcagctacaagccaaggaatggcaaagattgctggcagtccctcagaagcaaaggagaggcaaggaagggttcttcccctgagacttttttttttttttttgagacggagtctcactgctgtcagcctcagctggagtgcaatggcgcgatctcggctcactgcaacctctgcctcccaggttccagcaattctcctgcctcagcctcccgagtaactgagattacaggcacccgccaccatgcctggctagtttttgcatttttagtaga[143 bp omitted]agcgtggctcttcccgtgagacttcaacaccttggttttggacatttagcattcagaactgtgagagaacaagtttctagtgtgtgtgtgtgtgtgtgtgtgtgtgtgtgtgtgtgtgtgtgtgtgtatgtgttttagacagaggctcattctgttgcccaggctggagtgcagtggttcaatctcggctcactgcaaactccgcttctcagattcaagtgattcttatgcctcagcctcccaagtagctggaattacagaggagcgccatcacagccggctattttttttttttttttttgtacttttagtagagacagggtttcactgtgttggccaggctggtctcaaattcctggcctcaagtgatatgcctgccttggcctcccaaagtgctgggattacaggtgtaagccaccacacctggcctaagtttctgtgtgtgtgtgtgtgtgttttgttttgttttttttttttttttgagtggagtctcgctctgttgcccaggctggagtgcagtggcatgatctcgactcactgcaagctccgcctcccgggttcacgccattctcctgcctcagcctcccgagtagctgggactacaggcacccaccac[138 bp omitted]cccggccaagtttctgtggttttaagccaccttgcttgtaagatttgtgtgtgtgtgtttttaattttttatttttaagtattatgaatacataatagtggtgtatatttacaggacatatgtaatatggttttgggttttagtgttttttttttggagacagagtctggctctgttgcccaggctggagtacagtggtgggatcatggctcactgcagccttgacctcccgggctcaagggatcctcctgcctcagcctcccatgtaactaggaccacaggcatgccccaccacatccagccaatttttttttatttttagtggagatgaggtctcactgtgttgcccaggctgatcttgaactcctgagctcaagagatcttcctttctcaccctcccaaagtgctaggactacaggcatgagccactgtgcctgtccttccatgatgttttgatataggcacacaatgtgttagtttataaagtttgtaataatttatcacaggcagccctaggaaactaatatagccaagtttcctgtttcttctctatatcacatctgctggggctacatgtccaaggtggcttcttcacccacttgtctggtgcctgggctgagatggctgaaacatctggggctctatctccacatggcatttatacatgagtagcttgggcttcctcacagcatggtggtctcagggcagtagtacttttacatggcaaccagcttccccagagtgagcgttctaagattcagaaagtgaaaaatgaaagtttcttaaaacttggttccagaacatagcacagcaaaacttccaccacattctactggtcaaagcagtcacagagtcactcatattcaagaggcagaagtacagacctcacttctttaagccactacagtgacaggtggtgatatgtcattagagaaagccctaaacaagaaccttgtccctcacctgcccccaaataccatggaagatgtctttttttttttttttttttttttggggatagtctcactgtgtcatgcagtggtgtgatcttggctcactacaacctcctcctcctgggttcaagcgattctcctgcctcagccttccgagtagctggagttacaggcacccaccaccttacccggttaatttttgtaattttagtagagacggggtttt[136 bp omitted]atttgatggggaatgtaatttttgtctccatgggttgccttagcaaatgatgagaagaacatgaatttttcaatattgtgctcctagagtgccattgaaatggtagttctgtctctttttctgacagtcctgaggcatcccgggaaatagagcccagcctttatccccggtccccagcacatcaggggaagtgcactcctgtccttattcctcactgcagtgcatgcagggagttctggccatcaggttatcttctatccgtctcctttcccaaagcatgctgggaaatgtggggatgtctccttagaacaacaaaatagttgcaacctttgaagtttaggagaagactagaaggttagtgttcagtgtgtgatctggaagcttgcatttgtaagaattaaagaaagaggaggccaggcacggtggctcatgcctgtaatcctagcactttgggaggccaaggtgggcagatcacctgaggttgggagtttgagaccagcctgaacaacatggagaaaccctgtctctactaaaaatacaaaattagccgggtgtggtggtgcatgcctgtaatcccagctacttgggaggctgaggcaggagaatcccttgaactaggaggtggaggttgtggtgagctgagattgtgtcattgcactccagcctgggcaacaagagtgaaactccatctcaaaaaaagaaaagaaaagaaaagaaaaaggaaaaggaaagaaacatgaaatgtggcttgacggtgaaggacaggtttattttagagaaaaccaacctgaggggggcttttggctgagttaggttagagagcccttttttttttttttttttacagactaaggatatttaagagttttggaagggggtgcttatctaggttcggaatgttttcatgtgaggaaaagtttattgtggggttggaaagtctctggtcggaagggaggctatctgggggttggcatgtttctggtcagagaggggtttatcttagggttggaatgtttctggttatgctgatggtagccattaggctgatgttttggggctggatttagctgatttttttttgagacagagtcttgctctgtcacccaggctggagtgcagtggtgcaatctcggctcactgcaagctccacctcccggattgacgccattctcctgcctcagcctcccgaatagctgggactacaggcacccgccaccacgtccggatttagccgatttttaatcaagaggaactaagaatggtggtgtttgttcaagatggcagtgctcctgctctgtcagcatttggagtccagaaatagatgtggaggcagcccccaggaggacttccaacctaggcaggggcctcaaacatgacccctgattccaggagcctgtgaaaaggtgtcccccaccatttatcctcccaaagatagacactacaaagaagggcatacctggccttgtccactggtacaaaatctttatgtaagtataaaataaataatatgaatattaattaataacaacaacacaacagcggcaacaatattaataataacaagagctctcccattggcccacggccttcctccagcttttctcttctgcttcacacaactttgtgagatagctgttttcatagctgggaaaactgaggcccagagaggtcggcacactggcctgaggtcacacagcaagtctgtagggctgggagccgagggaagggcaaaggggtcccccggatccagccagggcagagagggggatttcaggtttaggtccagaggagagtgcctccccacagtctggcagtcattagcagggtgatggtgaggctgagatgggcagggccaggctgaggagcagccccactgcggtactggacatccaggtctgggtggttacagccacttttagtacagcaggagacatcaatgtggttcatgctgaaggcgtcacccaggtgggcatgttggcacattgaggcggttgcacagcctcttaccatatagctttggtttttcggttctgaggaaagagaagacggagtgagacttccagctcctgggcccaggactggaattctccagtaggtgacctgccaccttgcagtgggtgccaccttcactaccacctagagaaagcagcagttctcagggccaggtgtggtggctcatgcctgtaatctcaacaccttgggaagccaaggagagaggatagcttgagcccaggagttccagaccagcctggacaacatagcaaaactctgtttctacaaacataaaaaagaaaaaaacagctgtagtcccagctacttgggaggctgagatgagaggatcacttgagctcaggagatggaggctgtggtgagttatgatcacgccactgcactccagcctgggtaacagagtgagaccctgtttcaaaaaacaaataaaaagaaagaaaggaaggaagggagggagggagggagggaagaaggaagggaggaagggaagaagggaaagaaaagaaagaaagagagagagagggaggaaggaaggaaggagaagggaaagaaggaaggaagggaggaaggaaggaagaaagaaagaaagaaagggaaagagagacagagaaagaaaaggaaagaaaaaaaaagaaagaaaggaagcgagcagcggttcttaaagtgtggctcagggaccccagagaccctttcaggagatctgtgatttcacatggctttttcactctcataagtgtacaatgggcttttccaaaaactccaggacatgtgatattgcaagagactgaaagcagaagcttccatgaggacccagctgtcttctattaagctggacattaaagagatgtgcaacacagcaaaataatgccagttttctcattacgctttttttttgtttttttttttgagatggagtctcactctgtcacccaggctggagtgcagtggcacgatctcggctcactgcaacctctgcctcccgggttcaagcaattcttctgcctcagcctcccaagtagctgggactacaggcgcgaccaccatgcccagctaatttttgtatttctagtagagacggggtttcaccatattggccaggctggtctcgaactcctgaccttgtgatctgcccgccttggcctcccaaagtgctggtattacaggcgtgagccaccgcgcctggctggttttttttttgttgtttctttgtttgtttttttaagacagggtctcgctctgttgcccaggccgcagtgcagtggtgcaatctccgttcactgcaacctccacctcccaggctcaagtgaccctcccacctcagcctcccaagcagctgggactacaggcatgcaccaccatgcccagctaacttttgtattttctgtagagacaggatcttgctatgttgcccaggctggtctcaaatccctaggcttaagtgacccgcccaccttggcctcccaaagtattgggattataggcatgagccaccatgcctggctatcattacattttttctttggaaactatacttatttttcattaaaatgttatttatcttaatgtgtaatgagtttttattgttataagatgaattcata[131 bp omitted]aaccccgtctctactaaaattacaaaaataagctgggcatggtggctcatgcctgtaatcccagctatgcaggaagctgaggcaggaggattgcttgaacccaggagggggaggttgcagtgagctgagaccatgccactgcactctagcctggcgacagagcaagactccatttcaaaaaaaaaaaaaaaagatttctcagttttaattttaatttaattttattttattttattttttgggacggagtttcactcttgttgcccaggctggagtgcaatggcacaatcttggctcaccgcaacctctgcctcccaggttcaagtgattctcctgcctcagcctcccgagtagctgggattataggcatgtgccaccatgcccgactaatttgtatttttagtagagatggggtttcaccatgttggtcaggctggtcttgaactcccgacctcaggtgatctacccacctcggcctcccaaagtgctaggattacaggcgtgagccaccactcctggttctcagttttaattttaatgtggcatttatctatagaaatcactgatataaacaataaagagtttttttttttttttgagacaaagtctccctctgtcatccaggctggagtgcagtggggtgatccccactcactgcaacctcctcctcctgggttcaagtgattctcgtgcctcagccccctgagtagctggggttataggtgcacgccaccacacccagctaatttttgtaattttttgtagagacagggtttcaccatggtggccaggcttgctctcatactcctgacctcaagtggttctcctcctcaccctcccaaggtgttgcaattacaggcgtgagccaccacacctggccaaaaataatttttaaaagcatgaagaagttgagaccaaaaagtttgagaaccactggaatacagagacctttccaggacaccacaggatgaaagcccaagatgtcttcagcaaatccccacaacccacgagaaatccaccaaagaattccatttttctttttgtagagatgggggtcttgctatgttgcccaggctggtctcaaactcctggcctcaagagatcctccggcctcagcctcccaaagtgctgagagtacaagcttcagccaccgcacccagccggaattccacttttccatggcaaaaatgtccacatcctgatggacaagtcctaattccttacaataatattcacccacctgaaggaaatcccaccttttccacagggagacccaccacagttaactccagcttaactggaagtcaatctcttgcggaactctccacccccaataagtgttccctcccagcctcggagagggcctcaccgtgagtgccggtggctaccagacattgattcatggggcctcggcagtcaatgaggaaagtctcttcagaggagcatccatgggtgctgttccccttgcagctgtaacactggcggccattctgcggcagattttcaagctccaggacttaggagaagaccagagacacagagaccaagaaaattagtgcttggatctccacttccttgaatgacctccccaggacttccactccgagccagagatgtcatggagccaccttgtggtcaggcgtctgaatggcatttggagggggatggttttcgagggcttgagagaaaccccaactttcaactccccatgagtcccatttctggccaggcaccgtgctgggtgctgggtaaaactatgtaagatgaaactgtccttgctctcacaaaagttacaacttatttatttatttttgatacagggtctcagtttgttgcccaggctggagtgcagtggcgcaattgtagctcactgcagcctcgaccaccccggctcaagagattcttccacatcagcctcctgagtagctgggactacaggcgtgcaccaccatgcctagccaatttttctgttttttgtagagatggggttttgacacattactcaggctggtctcaaactcctgggatcaagcaatctgcctgcctcagcctcccaatgttctcggagtacaggtgtgagccactgtacctggccagaacttacaagttattactattattattactaaaaaattttttttgagacggagtcttgctatgttgcctaggcttgtctcaaactcctggcctcaggcgaccctcccgcctccgcctccaaaagtgctgggattacaggtgtgagccactgtgcccagccagaatttacaatttagagctacactacccaatctggtagccactggccacatgtggttgtttacatttaaataaattaatattaaatcgaatcttaaaattcagttcacatttcaagtgctcactgaccacatacagtggtggctgtaatattggacaggacagatagggaacatttctatctgttgacagtgctgggtaatagagacagggatctagattacactggaggggagggacagtgaaagcatccctgaagatgatacattaaagctgaggcctaatggatgagaagttgccagcagggtgaactcttggggaagatgtgttctaagggaggatattcatctgcaagggccatgagaccaga[133 bp omitted]cgccactgccctccagcctggctgacagagcgagactccatctaaaaaaagaaagaaaggaagaaagaaagaaactaaatgaaggccaggtgcagcggctcatgcctgtaatcccagcactttgggaggtcaaggcagaaggattgcttgagcctgggagtttgataccagccccggcaacatagtgag[137 bp omitted]cagtgaaaccctgtctctactaaaaatacaaaaattagccaggcatggtggtgggtgcctgtagtcccagccactcgggaggctgaggcaggggaatggcgtgaacccgggaggcggagcttgcagtgagccaagatcgcgccactgcactccagcctgggcaacagcgcaagactccatctcagaaaaaaaaaaaaaatgtagctgggtgcaatgatgcgcatctgtagtcccagctacttgggaagctgaggtgggaggatcactggagcccaggagtttgaggtggcagtgagccgtgattgtgccactgcaccccagcctgggtggcagagcaagaccctatgtctaaagaaaacacaaaaccccaaaaacgaatctaaacaaagactgtgaggcagacaggtgccagattacataggccaacagaataaggtctttggatcttattctaagaggaaggggaagtcattgaagtgcctgagaaaggagggtgacatgatctgatttacattaaaaaataaaaaattggtggtgcatggtggctcatgcctgtaatcctaacactttgggaggccaagcccaggagttcaagaccagcctgggcaacaaagcaagaccccatctctaccaaaaatacaaaattagctgggtacggtggcatgcacctgtagtcgcagctactccagtagcttaggtgggaagaattcctgagcccaggagtttgaggctgcagtgagccatgatcatgccagtgcactccagcctgggtgacagagcgagaccctgtcccccccataccccccaaaaaatcactcgctgctgggttgagccttggctgtagggtggcaggagtggaagcagggagaccagagaggaggtcattgcaacaacctgggcaagaagtcagcgtggctcagcccaggtggtggcagtggagcaggggaggagtgggaaaatttgagagagacaaaagagacaggaagcacaggtcttggcgagggctgatagtatcattgaatccttacgaagttcttctttgaagaaaggcctggctgggtgcagtggctcatgcctgttaccccagcactttgtgaggctgaggcagacagatcacttgaggtcaggagttcgagaccagcctggccaacatggtgaaacccccatctctactaaaaatagaaaaattagccaggggtgatggtgggcacctgtaatcccagctactcaggaggctgaagcaggagaatcgcttgaactcgtgaggcgaagtttacagtgagcggagatcacgccattgcactccagcctgggcaacagagtgagactccgtctcaaaaaaaaaaaaaaaaaaaaaaaggcctgatactcccatttttcagaaaagcaaacagaggcccagagaggacttgattgccagagagtgactgcgcagctgtctgcctgagtgcatgcccctgcccgaccccaggccttgcctgtgtctcccgttccttacttgggccctcgttgcatttggtggtgttgcagcatttcaggaagtggaaggtgtcgttgttgtggaaaccattggagcccgggcagccgggaaggtagccacagccacggaggtggcggtcatcctttggacgccctatgggggccaggggacagaggtcagatgtcagattgtgaatgagggactaagatgggatttgcccgaaatagcaggcattcaaccattctctacttcacccttcatcataagaccctcattttatctagaacagtcatagatcttgtcgaaaactacatattccagcctctccaggtagtcatgtgatgaagttcggactaatgtgatataaatagaagtgctttatgggacttccagaaaggagaacccttacaaaaggaggagtgcccccttttttgtcccttctttccttcttcctccttcctggaacttagatgtgagacccggagctctggcagccattttagactatgaggcattttgagaatggaagtaatgtgtaagaaacaagagggtggccgggcgtggtggctcacgcttgtaatcccagcactttgggaggttgaggcgggtggatcacaaggtcaggagtttgagaccagcctgaccaacatggtgaaaccccatctctactaaaaatacaaaaattagcaaggcgtggtgatgcacacctgtaatcccagctattcaggaggctgaggcaggagaatcacttgaacctgggaggcggaggttgcagccagccaagatcatgccattgcactccagcctgggtgacagagagcaagactctgtctcaaaaaataaataaataaataaataaaaagaaatgagaaggcatctgggttcctggtgactctggacctgtccttgtggccctggacttcctatcactggacctcttgtgtatgagagaacttagtcccttgctgacatccctgttactttggggttgtttgttaagtgcagtcttagggaggagcagagcagggaggaggagttgccagcaggttggggctcaccttcttcaccttcctggatccagtgggtcaccacatccaggcactgttcttcagggctgcggcactgcaggctctggtgccggcccctctcacagctcatgtctgatgagccacaggaaatgcattcgaggtaacggcttcgggaataggtgacagcccggcctgtttggaagagggggaggggagtgagactccatggggacagtcctggagccccagctctgcaaggactcactcaaaatcaattcctccttatcccaccctgcagccagtcattgagccctgcctattctgcctgctgaatctttctagaatccaccccctcctttccagccccatggaccagtccagctcagacctccttcaactccagctacctccctagcctctgggtttccattcttgtcaccccctactcaccccagtgcagcatctccacatggccctagaaacatttctttcctttttttttttttttttcccgagacagagtctcactccgtcacccaggctggaacgcagtggcaccatcttggctcactgcaacctccactccccgggttcaagtgattctcctgcctcagcctcccgaatagctgggactacaggcgtgcaccatcacgctgggctaatttttgtatttttagtagagacagggtttcaccatgttggccaggctggtctcgaactcctaacctcaagtgatctacatgccttggcctcccaaagtgctgggattacaggcatgagccactgcactcgggcccttagaaggatatttctaatactcatatctgaccctgtctctcctctgctcaagactcttccatagctccctactgccctgaaaataaattccaagatcctcagcatgggattcaaagcctatcaaatactggggcctgagcacctctcctgcctcgtctccctccactacaccctgagactctgctccacactgacttcccacagtctgcgacgacacatgttccctggcatccaggcctttgcatatgccgttgtttctgtctagaacacctttcctttgctctctgccttccctaactcctactcattcttcaggtgtcagctctaatttcacctcctctaggaagcccttcctgatccaccaggctcccacacacccctgtactcccccatcccactctgggtggtcactgtctggtgacaggtatgtctcctctactggactgtgagcccccaggagggcagggccaggggctgtcttgatcactactgtgtcccaacaccacctggcacatggccagggacagataagatattcaatgcatatttgttaaatgaatgaatgaatgagcaattacttaaaacccttctattgttccctgtggtagcctgtctccaaaatggcccccaataatctctgctccctggtattcatgcccttaaagaatagggctggctgggtgcagcagctcatgcctgtaatcccagcattttgggaggccgaggtgggaggattgcttgagtctgggagtttgagactagtctgggcaacatagcaagactctgtctttaaattaaaaaaaaaaaagaagaagaaaagaataaggatgccctatgtagtcaactggatattatggaaatgatggtgtatgccttctgtggctagatcatagaacacatgcctggctctctcacttggatcactttttctggggcaagcagcagccatgttgtgaggacactcaagtagcaccatgggaaagttcacgtggcagaactgaggcctgtgccaaagccatgggaggggagcattcatgtgagtgaagctaccttaggagccttcagatgactgcagccccagctgacatctcgactgcaggctcatgaaggatcctgagccagaaccacctagctaagccactccagggtttttgaccttcagaaactttgtgaaataacacatgcttattttattgctgcaatctgtaatgcagcaatagataatagataagcaatagataatacactacctaattgtcccagggatcaaagactcacttgactgattcctgatcacttcgccttttgcacgaaccttgtggtgttggccaactggatccgttacttttccctggaaacaccagagtcattcctctacccagcccttggctcacaccatttcccatgcttggcatgccctccccgtcctgacccaagacacatctaagctgagtccaggccaagtcttaaaaaagtgagaggaccatgtcagccaaggttctcaactggcaggccgctagctgtaattaggcgaatcatttacatccaaagcccaatcgtccccctcaaagaaaaataactacaaggccacccacgtcttctcacacaaacttccatgaaaatgaaaacacaaattctcaccattgccaacatagctgttcatacctagaacaccttttccttgagccctactttctctaactcctattcattcttcagctgtcatcttcaatttcacctcctctaggaagccctccctgacccatcagcctggaacgggtacctgctctgagctcccactgccccttgaattccccatttctagttctgcccactctgggtggtcactcatgggtctctggtgtgaactcttgtaaatgccaatgatccttagggctattttcctttttcttttcttttctttttttttttttttgagatagggtcttgctctgtcccaaggctggagtgcagtggctcactgccacctcgacctccctgagctcaggtgattctcccatctcagcctactgagtagctgagactacaggcatgtgccagttcacctggctgattcctgtatttttgtagagacaaggtcttgctatgttacccaggctagtctcgaactcctggactcaaatgatcctgccgcttcggcctcctaaagtgctgggattacagacgtgagtaccgcacctggccagggctctgttttaagccctttttatctctcacagtatagactctctcatggggtaaatattgacatgacttcatttccatctatctgctcatcactcacaaatctctctctagtctagacttctctctgagctccagacacgcaactgtctcttcgaggccccatggctatacctcaaacacctgtcctaaacaaaactccccatcttctcccacaactgctctttttcttgaagtccacgcgtccaaggcggccccatccagtccccggggcagaaacctggcagacccccttatcttccacatctgtgcatcaaccgacatgcttctactgttctgtcttctagctccttaatccttttgctctgctgtttctgacctctatcaagcataactgccgagttcttcatttgagtcactgttctatattttctgttggactcttttaaaaaatggattccaggtgctaaaacatatcctttcttctgttttcctgaatatatcgattgtagcaattttcatgtttcctgtcctataatccaatatctgagttgctacaattctgtttctacagttggatttttctcttggtttctggtcaattggtcccttttattttcttcaggataccttgtaaggttttttgttactgttttttattttttgttttttgttttgttttgttttgagacagagtcttgcgttttgttttgttttgttttgttttgttttgagacagagtcttgccctctcgctcaggctggagtgcaatggtgtgatctcggctcactgcaacctccacctccctggttcaagcaattctcctgcctcagtctcccaagtagctggtattacaggtgtgtgccaccatacccggctaattttttttttttttgtatctttagtagagaaggggttt[132 bp omitted]tgctatgttgtccaggctggtgtgcagtggctattcataggcataatcctgctactgatcatcacaggagttttgacctgctccatttctgacctgggctgcttcaacccctccttagacaacctggtggtcccctgctcctgggagatcaccatattgatgccaaacttagtgcagacacccggttgatatagcacactacagcccagaactctcaggctcaagaaatccttccaagtagttgggactacagacgcatgccaccatgcctagctatcttgtaaattttgatcagacgccagacattctagataaaaatctgtcaagggcctaaacgatgttttcttcttccacagagagtcaggttttcattcctgtcaaggactggacctaggcttgtttagggctggtctatttcactttggcccttacccctggggtggtcttagggggaaagcctgagatgcttaccaaggcctcttcagcttggcaacctgtgtccccagcatcacatgtctgctggaagccttgttcgcttttgtagcttcccagttgctatttttctcttccaagtttcttggactctcaccctgtgcatgtagagcttgccaatgacttgagggagatttgtttgcaggttgggaactcccttttctgtggtcccatccattccaggattttaactctcatcttccagacattctggcagccccaaactccaacctccgtcttctcagtctagcgactctctttccgtctgggctctatttcccttccacagcagcagattggcaagtgcgctccgggaaaaagccaggttgtctgtggaacccaaattctacacttctgttatttcagagattgtagcgcctcaagtttctcctttctttcttttttcttttttttttttttgaaatggagtctcgcgctgtcgcccaggctggagtgcagtcgtgtgatcttggctcactgtaacctctacctcccgggttcaagcaattcttgtgcctcagccacccaagtagctgggaccacaggcatgtgccaccacgcctggctaacttttgtatttttagtagagacggggtttcgccatgttgcccaggctggtcttgaactcatgagctcgagcaattcacctgtcttggcctcccaaagtgctgggattacaggcatgaaccactttgcccagccaagtttctcctttcatttgctgctctccagtgacttccaataattgtttattatttgtccagcatttgcaactgtcattggcagaagggttggtctgatacaagtgactccatcatgaccagaattgcaggtcccctcccacatctaatccaccactaaggcctgcttcttaatagctcttgttcggctttggttgagacagggttttgctctgccgcctaggctggagtgcagtggcgtgat[131 bp omitted]cacctgacaccctagtcctgctgccctcttctccacctggacaacctcgcccacccccaagttggtttcccctcatctactcttgcttcctttcagtctatcttctgtcctgaggtcagaataatttgttaaaaatataaatgggggccgggcgcggtggctcacgtctgtaatcccagcactttgggaggccgaggtgggtggatcacgaggtcaagagttcgagaccagcctggccaacatggtgaaaccccatctctactaaaaattcaaaaaaattagccgggcatggtggcgggtgcctgtaatctcagtttcttgggaggctgaggcaggagaatcacttgaacctaggaggcggaggttgcagtgagctgagatcgcaccattgcactccagcctgggcaaaaagagcgaaactccatctcaaaaataaataaataaataattgcgatcatgacattcgctgtttaaaatcttctgtgatgccccagtgctcccaggacaatgtctagaaacccctgtgtaacatgcccctgccaagctttccagctcatctcgccccactgtactgtttcctttgtccagccacactgcttttggccacctttgtatctgctgctccctctgctggaaaaccctttccactgtttttttttttttttgcaggatctcgctctgtcacccaggctggggtacagtggtgcgatcatagcttactgcagcctccaccacctgggctatagtgatcctcccgcctcaacctcccaaggagctgggatcacaggcatgtaccatcacatctggctaattttttaatttttttgtagagtcatgttgcctaggctggtctgaaacaatcctcccacctgggcctcccaaagtgttgggattacaggcgtgagccactgcacccagcctccattagctgtttaatagtctgattcctactcatccttcaagatccagcttagctgttgcttcccctaggaaaccttccctgacctgagtcaggtatctcctctagggtcccacagctcctactcttccctcatcccagccctgacccctctgcctgtgtttcccccttcatagcccagacaaatctattaggttggtgcaaaagtaattgtggtttctgccattgcttttaatggcaaaagccacaattacttttgcattaacctaataatcagtcactgtctggtgatggatgggtctgtcacccctacacacacacacacacacacacacacacacacacacacacacacacacacacaggactgtgagtcccatggagtcaggcagggcacaaggctgtcttggtccctgctgtgttcccagcatcatgtaagtactgagtgcagtttaaccaactatgcaagttgccacaagcagggtacaatggcattagaaatggggatgaggccgggcacggtggctcacgtctgtaatcccagcactttgggaggctgaggcgggcagatcacctgaggtcaggagttcaagatcagcttgaccaacatggagaaacctcatctctactaaaaatacaaaattagctgggcgtggtggcgcatgcctgtaatcccagctacttgggaggctgaggcagaagaatcgctcgagcctaggaggcggaggttgcagagagccgagatcgtggcattgcactccagcctgggcaagaagagtgaaactccatctcaaacgaacaaacaaacaaaaaaaaaaaacaaaaacaaaaggaaacaaaaaaaaaaagaaagaaaaaagaaaagaaaaagggatgatataggtatctcagttattagattcctgaattgatagctgctgctctaagctcctggtggatccctgaccactgccaactctctccccaggacccttcatgtccctgtgacccatcatggaaaggggcaacaccaggcccagcagcggactccaggagtttgtcccagcactgaccaatattgttaaatattttcgctatcatctctgattgaatgcactacttagacccaagtattggtgctttccttaagcacatctcaccgagacgggaagcccacatcctctcgtcacttcctcaaaacaaacatctgatttggccccaccagcggattagtgtttgaggtcaggatggatgaaaaccaggcagaatcaggatgaatgaagaacaaagaaaacccagtgcaaacgcagcactctgctcactgatgtcaccaaccatgactagactggccttaccctatttccttcctcaccaggtccagaaagaggaatctctttcacggatggatccatgcaccatggacccattccttccccacccttcctctcctgtgggaatttaggaaaatttgaccttttctaagtctttttcttaaaatgatcagagcctgaagccatgaaattcgacaaaggggcttatggttgttgcccaggctggtcttaaactcttgggctcaagcggttctcccgccttggtctcccaaagtgcttggattacaggcatgagccaccacacccagcctattatggacatttcctcacatttgttttttcactgcccaagtcagagaccatctattgcagaggattctcccagcctactgcggcccatttaatcttcccctctttcgacttcccttaagaacgtcaagtctttgcttgaatcctggcccctcagtatctattgcttggaccatctcccgtcccaatggattgggcaggaccatctcctgcccagtcagatggacaaacatcactgagacatctcatctatgtctcatgcatgcgtgtgagcttgttaagggcagagttgcaagttatacataacaaccatacatacaaacatgcaggatggggattgggttaaggatgaaagtaattgtgtcgttggggtggggatttgggtagtctgagataaggatggggttgatttggggatggggttggaactgtgcttggaacagggctgggtttgagttgggaacagtgttagggtaacatgaagttgggcataggattggaggtgaagttgagttggggttggatatggggtcaagaatgagttggggatggagctgagctagagatgggttgggttggggttgggacttggataaggcatggagttggggttcagctgatgtaaagttaagaataggattgggatgatgatgaggttgagctggggatggcttggggttggggatggcaagggctgccctactcaccagagttgccctggttgcacaagtctaacccacacacaacctcggtaaggctggtgatcttcaagccagtccgatagctcagggtcctgttggtcttctctgagtgggtacagcttttctccaccagctccagctcttctccttctgcaaggaggggatcttcattaccccagaggctcctctcagctcaaccagcctctgacactcctggtctcaaggtcatccactcccagggctgatctctgctaggcctcttctgttatttgagtcgaactctgtctttttctagagttaaccttgcctccacccccaccccaacaaggagcctgctctattttatttcaattaattaattaattaatttttttttccgggagacagggtcttgctctgtcacccaggctggagtggtgcaatcatagctcactggagccttgacctcccaggctcaagcagtcctgcttcggcctcccgagtagctggaaccacaggcttacatcaccacaccctgctaatttttaaattttttatacagatggcatctcactatgttgcccaggctgatctcaaactcctggcctcaagtgatcctcccaccttggcctcccaaagtgctggaattacaggtgtgagccactgtgtcccactcctgctcttgtagtgacagcactacaactgggactttctggatccatctatccctcccccacaccctcagcttagtgatctcagtactgagatgcctcaaatgtaactttattttatttatttatttattagaaacagggtctctgttgtcccagctggggcaatcatagctcaccacaacctcgaacttctgggctcaaggaatccttctgccttagcctcctgagtagctaggggtacaaatgtgagctactgtgcttggcttcatatactgttgtttcatgtgttcttaaagcttataaaaaacgtatcatattctgcaacatttttttccctctcaaccttaggtttctgagatgtgtccacattggtatctgcagctctatttccttctttaagctgcagtagagcgctccattatgtaattattaccacagtgtttctcttctgctgctgacttgctgactgacataaagtcgtttccattttcttcttttctttctttctccccttccttcctccctcctccctccctccctccctgcctctctccgtccctccctcccttcctctctctctttctctctctctctcttcctttcctttctttctttctttcttgagatggagttttgctcttgtcgcccaggctggagtgcaatggcacaatctcagctcactgcaacctccgcctcctgggttcaaacaattctcctgtctcagcctcccgagtagctgggataactggtgcctgccaccaagcccggctaatttttgtattttttagtagagacagggtttcaccatgttggccaggctggtcctgaactcctgacctcaggtaatccacctgcctcagcctcccaaagtgctgggattacaggtgtgag[131 bp omitted]tcctgtctcagcctcccaagtagctgagattacaggtgcgtgccaccacactcggctaatttttccttttttgtgtgtgtgtggagacgggtgtttcaccatgttggccagcctggtcttgaactcctgacctcaagcaattcatccgcctctgcctcccaaagtgctggaaatacaggtgtgagccagtgcccagcctgtttccaattttccatgtcacaaacattgctgctaagaacattcgtatacatgtgtccctgggtatatgtggccaaggttctttggcatttctgcatggcgaggagttgagctgtagcatatgttaatcttcatctggactagatattgccgaatcgctctaagtggttgatgtgccaatttactcccccaccacagacacggtctgcaactccacatccttactaacccgggtattgtcagatttttaaatgcttgccaatctggtgggtgtgaaatgggctctccttgtttgtttgtttttagtttgcatgtcccagttactggtgaggaaggtttctcaatcactcgcgttccatgctgcgctggaggggtgtgtgggttggggggaagctcaccttcccacaagcgcacgatcgtggtcctgcagaggtcctgtcccagggcgcactcttccacacggcaatccccgttggtcttacactgcatgcaccgcaggccccaagaggctgggggaaggagggagaggagaggagaggttaactacgcttagctccaagacccccgctcacccctgcatgtcccaataccaacaccaagtctccaggccccgtccattcagattcgtgtccatgttctgctgggttccggccggcggtacttccagtctgtccgttgtccacgttctacctccaccccactaactgaacgttctatccctgcccacaagtcctttcccaaagtcctgccttggcccgtttttcctttcattctgtcctcgtgaggcgtatatcctgacagtcgtatccccgccctctctatcagtacgttctattcctgctcctattaggtctttctcaccgcaccggccctcggtcgattacgcctctccagttctgctggggacgttctagccttgccccacccgcgtcgatctttatgttataccgtcactcccagtgccctaatggaactatccctccactcactccccctggttctacccggctccagagcctctcccggcccactaatttattcccaaattctaggcccggccccatcagccctccggagtttctattgttagatactctagtttcccgcgaagttctgtctccgccctccagctctccaactaggttttggccccgctccagactcatcgtcgaggttctagccccgccctttagctcttcctgaccttatcttcccgccccctagctcctccccgatgccataaccccgcccctagctcctcctcgaggctttagtccctccctctagctcctccttgagattctaacttcgccctttagctctccccgcccctagttttcccctgaggtcataactccgccccagtcccttcttgaggtttcagccccaccctgtagctcctccccgaggtcgtaacccccgccccttggccccttgaggtcctagcccagccccgtagctcctccccaagcttataaccccgcccctagcccctccttgaggttccagccccgccctctagctcctccccgaggttataatcctgcccctcaagagtctagtcccaccttctagctcctcccgaggttataactccgccctctggttacgcctcgaggttataaccccgccctctggctccgcctcgaggttctagccccgctcctagctcttcctcggtctgtaacctctcccgtagctcttccttgaggttccagccccgccctctggctcctccccgacactctctccccgccccaggctccgccccgagattgcagcccagtccctaggcccggtccccgacctccgggccttcccggacatccctttccagctgcgcgttcggagtatcccggagctgttactcattcccggcctcccgcggtctcgagcgctttccgggttattcatcgcggccccaacaccctgtggccacccgccctgactcagttccttctcgaattcctcgacccagagccccccacattttccggggaagtaagtgagagtcgcctcagtgagagggaaaggtcctgagggacagtcccgggtctccagcactggctctgcgccgctcagtcagcctccctttgggccttttgtaaaagggggtcctgtccccccgtttctcagagggggagacccagcagcgtggagagcgctggggggcgctgcagggtcagatcctgcgtattcaagcactggctgtgtgattttaggccagttatctaacctctctgtgccctagtttcctctgcgaaacgaaattaataaagtcccatcgcctagtttgaaattgcaaggaagaggcttcgaagaactccatttaaaaaaagaacacttgggccgggcgcggtggctcacgcctgtaatcccagcagtttgggaggccgaggcaggtggatcatctgaggtcaggagattgagaccatcctggctaacagagtgaaacccggtctccactaaaaatacagaaattagccgggcgcgatggcaggcgcctgtaatcccagctacccaggaggc[136 bp omitted]atgtaaagctaaatgcctttgctccactaatatttccttagctactgagtgccaggtactgcgccgcgtggcgttgcacaaagcacgagaattactattatttgattagggaggatgctgaggactgaaccgcattcctccaactcatcctctgacaacccccaaccccctcaattagaccctgttccaggcgcaggcgttcgggacccagcccctacctgggacgcaggtgtggagcagcagcagcagcggcagcagcggcgggtgacccatgtcgcgagggcagctcctgtgcgcggggtccctgcacgtcttctctccttctggcctcaggaaggaggcagttttgtggccccagggactcctcccagacgttttgcgaaagagcgagtcagccccagatgcgtgggcgcctccccctcctcccgtacgaacctcctccgccacaaacttcccttcccggggcgcggccggctggtggtgaaggggctggctcggccctgactcatggagttgtgatcacagctctgtccccagattgcctgggtgcaaatcccagttctctctcttcctaacgtgggacccggggcaatcgctctccactgctgtaaaatgaggataaaaactttgacggtaaatatgaatgtggctgattatttggctaacaggatttttgttagttttgtcaggagggatactggtattttggaaaatgtccttatctagagatgcatcctgaaatatgcatctcttaaacacttaaaacacttaacccttgctttgcttcccgctgtgcccccagctcctggaccagtgcccagcacgaagtaggtccttggtaaatgttaaaggaatgtgttgagccctcc[134 bp omitted]gaatcgcttgaacccgggaggcggaggttgggttgcagtgagccgagatcgtgccactgcactccagcctggcaacagaacaagactccttctcacagaaaaaaaaaaaaaaaaaaaaaaagacacttcagccaaaaaagtagatatcactgttacgacaatggctgtatgcttaggtgggattctggtttttgtttgtttgtttgtttttgcagatgcttactagagtatttagtggtgaatgttattgatgtctgcattttttgttgttgttgttttggggatttttgttttgttttttctttttcttttgttttcattttgatgtctgtatttattttataatattttagaagaggtcagatgaggtggctcatgcctgtaacaccaatgctttgggaagccaaggcaggaggatcacttggggccaggagttcaagatcagcttgggaaacataaagagccctcatctttccaaaagaaattaaaaataaaataaaattagctgggtgcagtggcccgtacttgtagtcctaggtagttgggaggctaaggtgggaggaccgcttgaacctgggaactggaagctgcagtgagctatgattgcaccactgcactccaacctgggcaacagagcgagaccctgtctcaaaaaaataataaataaataaatacttgagtagaaaataaaggcaaaatagccaaatggttgtatcaattatataaaggtaatcagtatataagggcatattatgccattctgtctccttttctgtgggtttgaaaaggcttataataagttttttctttctttttattatttatttatttatttattgagacgaagtctcactctgtcacccaggctagagtgcagtggtgcaatctcggccactgcaatctccgcctcctgggttcatgcaattctcctgcctcagcctcctgagtaactgggattacaggggcacgccagcacacccggctaatttttgtatttttagtagagatggggtttcaccatgttggtcagggtggtctcgaactcctgacctcaggtgatccacctgccttgtccttccaaagtgctgggattacaggcatgagccactgcacctggccaagttttttttttttttaagtaaaataaaatactaaagataaaattgtctccccgtcttaggatgcatctaactaaacagagcaatttaatgtaggtgcaatgcctggaatagctgctggccgaaatggagggctcaacacattcctttaacatctaccaaggacctactttgtgctgggcactggtccaggagctaggggcacagcaggacgcaaagcaaagttcccaccttttgttgtgttgacagtggggagcagatatgtgttatctaatctttcactgtctgagagggataagcaaactggagaaaacaaagcaggctgaaggaagtatctgggtgcaaatgaggtgtgagctgttttaggtgggtgatccaggaggggttccctgagcaagtggcattcaagcagaggctgaatgcagtgagggaagaagtagggcagatgggcagggaacctttccaaggagcaggaacaaccagtgcaaaggccttgaggtggaagcctgatgagattctaggaacagaagagatgtcagtgtggctggaacagattaggagaggaagagagtcgtaggggatgagtaagtggtagctacttctactgctgtaataatgattatactatgtgatttgttgtcgttgttgttgttgtttttgagacagagtctcactttgtctcccaggctggatgcaatggcgtggtctcggctcactgcaacttccacctcccaggttcaagggattctcatgcatgcctggctattttttttttttttttgagtcggagtttctttcttgttacccaggctggagtgcaatggcacggtctcggctcactgcaacttctgcctcccaggttcaagaggttctcctgcctcagcctcctgagtagctgagattacaggcattctccaccatgcctggcgaattttttgcatttttagtagagatggggtttcaccatgctggccagactggtcttgaactcctgacttcaggtgatccacccgcctcagcctcccaaaatgctgggattacaggcttgaaccactgcgcccagccctaatttttgtattcttagtagagatggggtttcgccatgtcggctaggctggtctcgaactcctgacttcagatgatcaacctgcctcagcctcccaaagtgctgggattacaggggtgagccaccgcacccggccctaatttttgtattgttagtagagatggggtttcaccatgtctgccaggctggtctctaactcctgactacaggtgatccacccaccttggcctcccaaattgctgaaattacagacatgagctaccgcttccagcctgtactatgtgattcttactaactcattgaagctgtaagctaatgattttaagataaggttagaaaacaaaaaacaaaaaaactcccaatggtgagcacagtggttcatgcctataatctcagcactttgggaggcgaaggctggaggattgcttgagctcaggggttcgagaccaccctgggcaacatagtaagaccttgtatctataaaaaaataaaattacagcctggacaacatagcgagaccttgtctctatgaaaaatagaaaaattagccaggtgtcgtggtgcacacttgtggtctcagctactctctggttgaggtgggaggatcacttgagccccaggggtttgaggctgcagtgagccaaaatcgagctactgaactcgagcctgggcaacaaaagtgagactgaaaaaaaaaaaaaaaagaactcccagagaatttcctaagaggtagtatagcccaatggttaagagtgtgggagctggtctcagattgtgaaaatctaaattgcatctacatattggctgtgtcacctctagcaggttacttaatctatctctgtgcccaagccccttatctggaaagtagagatagcaagtatcaccctcccagggctggtgtactgcggaggtaaaagaatccacctaaaatgactgagcatggtggctcatgtctataataccagtgctttgggagaccaaggcaggtggatcacttgaggtcaggagttcaagaccagcctggccaccatggcaaaaccctgtctctactaaaaaatacaaaaaaattagctaggtgtggtggcatgcacctgtagtcccagctacgcaggaggctgaggcacgagaattgcttgaacctgggaggcagagattgcagtgagccgagatcgcaccactccactccagcctgtgcgacagagctagactccatctaaaacaaacaaacaaacaaacaaaaagaagaatgctcctaagatgcttgccacagtgcctggtacatagtatgtgctcaataaaagcgatagctgccagtattatcattgttgcaactctggacattcacctcttcctggagtaggaagggagatggaggcctgtcattgagtctgacgtcaacagttatcacgcgtcagctgctgaagtgggcacttccctggctgggtcaccctgggccaatgacattcttctttctgagcctcagttttctcagctggagaaggggatccctcttgggctggtgtgaaaactaaactagatcggaatgtacatgaggtggggaaatagacagttggggtgttggtccaagcaggcttgagacccagctcagccacttgcttctgggtgaccctgggcagatggcttcactccatcaatccccggctttgccacctatgaaatgggtctggggtgggtagggggcatctctcagtgaagagaaaactcaggtttgagggtcatgcggagctgtgtgctgtgctgctaccac[134 bp omitted]cccacttcagcctcctgagtagttgggacctaggggtgtgcaccaccatgcctggctattttctcatatttcgtgttttttgtagagatggagccttggtctgttccccaggctggtcttgaactgctgggttcgagtgatcctcccgccttggcctcccaaagtggtgggattacaggtgtgagccactatgctcagccaatttcctctttaacgaatgagaggtatttcagagcccactcatccctgcccaaggctgccctcgcctcctgaaatttctgtctctccctgtgtctttgtctttttctatctctctgttttgttgttttctttgtctctgtccctctttctctctctcaatgcctatctctctctctctccaactctatcactttctctctctgtacctcgatctctgtatctgtttgtctctctcttcatgtctttttatctctgcttctcccttttctctgtctctccccatggctctctttctctttctgtgtcattgtttctgtttctctttctgattctttctctctgtctctccctcaagtgacacacacacacacctgtaaggttctgctgacgtgtaaagggaagggaaatgcagggatcaggacctggacactctccagaaacacggcagggatgtcggctccttcctcctcgtgactcacctgggcctcacccagctcttgcctgcctgcgggatcatgggtgaggcccatgggtttcgggggcttccccagcctgtggagaggagaatttcaggcagagacagagagggtgatagaggaggaggcaaagagagggagagacagagagagagagagagagctggggatagagatggaggtggggaaacgagggagagggagagagaagagacccacagacagactggctcaggggaaatctgagatgggggtgtggggggagtgagagagacagaaaacagcaaccgaagaacaaggacagggagaaagaaaaatgggcaagcagggagagagagaagataagagactgacagaggagttagagaaaacaacacacagttgccttcagagaacacaaaatagacacagagatacagggacactgtgtgtgtgcgtgtgtgcatgtgtgcgcgtgtgtgcatgcgtgtgcatgtgtgtgagtgtacgtgcatgcgtgtgtgcgcacacatgtgtttgtgtgcatgtgtgtgcatgtgtgtgtgcgcgcacgtgtttgtgtgcctgtgtgtgtgtgtgtgcatatgtgcatgtgtgagtgtgtgtatgcatgcatgtgtgtgagtgtgcctgcatgcatgcgtgtgtgtgtgtgtgtgcacctgtttggggctccctcatcctcttgccacctgccatgatgaagtgactgccctctggcctggccgctgggaaggtccttctctggttggggaggtgggggggatggggggtggctgagctgatggtagggaaagggccatcgctcataacctcccctttctgggacgcctaacaggccacactgatgtggctttcagatcctggcctggacacctcttagatgtagaggacctctccactcagggcctccctggggagtggaagagctggtaaacccttgagtccaataaccctcttcccccgttttccaggcagagaaactgaggtccaaagggaagactttttatttttttgagataacgtctggctttatcgtccatgctggagtgcagtggtgagatctcagctcactgcaacctccacctcctgggctcaagccatcctcccacctcagctgcccaagcaggtgggatgacaggcgtgcactaccacgcctggctaatttttgtattttttgtagagacaacatttcaccatgttctccaggctggtcttgaactcctgagctcaagcgatctgcccacctccacctcccaaagtcctgggattacaggcatgagccacggcgcccggcctaaaacaggagactttaaatgagtttctccccgtctcaagtttattgtgtttgtgttacagtgggtactgttttgagagtattatctatattattggtgaatctgtaaatatcctatttcgtacacacacacggaaactgaggattagagaggtgtggtgggctgagagatggtccccgaaaatatccaggtcctaagccctggagcctatgggtgttaccttaaaggaaaaaagggtctttgcagatatgattaagttaaggaacttaatcaggaacattttcctaattatccagatgggccctaagtgtaatcagaagtgcccctggaggaaggagggacagggacatttgactgtagacagaagaaaagtaagtcatgggagagaagcagaggaaaacagggtgggagacagaaggtatttgctgcgggctttgatgatggagaaatggccaagaaccaagaaacgtaagaaatgcagctcctgctggaaaacgacaaggaaatcactcaccccggacatctcttgaccagggcactgctctgctgacaccttgattttgattacatgagacacattttgtacttctgacctccagtctgtgagagaataaatttctgttgttttaagccactagatctaagctaatttgttacagcaaaataggacaccaatacaagaggttaactcacttgcctaaattgagctgatattttttattttttgagacacggtcttgctctgttgcctaggctggagtgcaacggcaggatcatagctgattgcggcctccagttcctggcctcaagtgatcctcctgcctcagcctcctgagtaactggaactacaggcccatgtgaccaagcctggctgattttagagagcttttttgtttgtttgtttgttttgaggtggattctggctctgttgcccaggctggagtacagtggtgcaatctcagctcactgcaacctccacatcccaggttcaagcaattctcctgcctcagcctcctgagtagctgggattacagatgcctgtcatcatgctcggctaatttttgtattttagtagagacggggtttcactatgttggccaggctgggcttgaactcctgtcctcagttgatccactcaccttggcctcccgaagtgctgggattacaggcatgagccatcgtgtctggctgcctggctgattgaatttttttttttaatagagacggtgggggagggtggggggtctcactatgttgcccaggctggtcttgaactcgtggcctccatcattcctccagtgttggcctcccaaagtgttggaattaataggcttgaactaccacatctggcttctaaactgacttgttaggccaggtgtggtgcctcatgcttgtaatcccagaactttgggaggccgaggcggaaggatcacttgaggtcaggatttcaagatcagcctggccgacatggtgaaaccccgtctctactttaaaaaaatataaaaattagcctggtatggtggcaggtgcctgtaatcccagctactcaggaggctgaggcatgagaatcacttgaacccgggaggtggaggttgcagtgagccgagaacgcgccactgcactccagcctaaacaacagggcgagactctgtctcaaaaataaataaataaataaataaaataagataaactgacttgctaagtgtagtgtcaggatttgaacccctgcattctggctctgtttcctacacttacacccaccatgctgaggggtgctgccctggagtagggcaagcaaagactaggagctattaatagaagtttcatcctgttctctcccagctcccgcctctttccatctcatccttcagcagccttctttgctatgcctctctctggcttcatggtattaggggtgacttggaaagaagcagggaccagaggaataatattcactgagtttgtgtaaagaaaaaagctttccttgcctctagcaccttgcagctcttttattccaccgcctagatgcaacagcagaaatcatctttgcaattcaaggcctaatattctgaatatataaggagctcctgttatgggttgaattgcttcccctccacaccagaaaaacataggttgaagtcctaacccccagtactcagaatgtgaccttatttggaaatagggctgttgcagatataattagttaagttgcagtcatactgaagtaggttgggccccaaatcactatgactggcatccttataagaacgtggccctaggccgggcgcggtggctcacgcctataatcccagcactttgggaggctgaggtgggtgcatcacctgaggtcaggagtttgagaccagcctggccaatatgatgaaaccccatctctactaaaaatacaaaaattagccaggcgtggtggcgcgtgcctgtagacccagctacttgggaggctgaggcaggagaatcgctagaacccatcaggcagaggctgcagtgagccgagactgtgccactgcactccggcctgggtgacagagtgagactccatctcaaaaaaaagaagaaggtggccctgtgacgacagagagacacaggaataatgccatgtaaagacaaaggaagagagtggagctaggcagctgcaagccaaggaccgccaaagattgccagaaagccactgctgctgggaagagccaggtaggagtcctctatgggtttatggccctgatgacaccttgatcttggacttctggactctggactgtaagacaatacatttgtcgttctgacccacccagtctgtagtactttgttacag[137 bp omitted]accatgaaaccccgtctccactaaaatacaaaaaattagctgggcatggtggagtgcacctgtagtcccagctacttgggaggctgaagcaagagaattgcttgaacctgggaggcggaggttgcagtgagctgagattgcaccactgcactccagcctgggggacagggtgagactcgtctcaaaaataataataataataataataataataataattaatagaggacaggaaaagaagcacaaatgacccctataaaaatgacactaaccagtcacagtggcttacgcctgtaatcccagcactttgggaggctgaggcacgaggatcgcttgagcccaggagttccagaccagcctaggcaacaaagggagaccttgtctctataaaataaaaaaaggttagccaggcgtggtaggacatgcccatcttcccagctactcaggaggttaaggaaggaggatctcttgagcccaagagttcaagactgcaatgcgctatgattgtgccactgcactccagcatgggtgacagagtgagactatgctctaaaaaaaattagtcaataagagagaccccagagatctgtttcgtcccttctaacaggtgaggatgcagcaagaaaatgccttccatgaaccagagagcaggatcttgccagacactaaatctactggtgccttgacctaggatttcccagcctccagcactgtgagaaataaatgtctattgtttataggtattcagtttgacagatggtcttatttatatgtctggactctcaaccgtgatgtttggggtgctgggagcctctctcctcaagatttctcaccctgcaagaggtaagcctgggctccttcatccagtgtcaaagggttttcagcagcaagaaagtgagaacagcagtgacaagttctttttgtttaaatttttaaaactaattattaattttatttatttatttatttatttatttatttatttatttatttattttgagataggatctctctctgtcacccaggctagagtgtagaggtgagatgtcggctcactgcaacctccatcccctgggctcaagcaattctcccacctcagcctcccgaatagctgcgaatacaggtgcacaccaccatgcctggctatttttttgtattttcagtagagacagggacttgctatgttgcccagactgatcttgacctcctgagctcaagcaattcacccaccttggcctcccaaagtgctgggattacaggggtgagccactgcacccggcctaattattaattattattattattatcattattattttgagactcagtcttgctctgtggcccaggctggagtgcagtggtgtgatctcggctcactgcaacctccacttcctgggttcaagcgattctcctgcctcagcctcctgagtagctgtgattataggcacccgccatcatgaccagataatttttgtatttgtagtacaggtgaggtttcaccatgttggccaggctggtctcgaactcctgaccttaaataatccactcacctcggcctcccaaaatgttgggattataggcgtgagccactgcacccggcctaattattcttttttggaaacggggtctcactgtgttgcctacactggtcttgatctcctgggctcaagtgatccccctaccgtgccgcctcccagagcactgggattacagaggtgagccattgcgccctgacaaagctgcaagttcttgaggccaggagctcaaggcccaggctcagaactcatgggacatcaatatgtctcattctattggccaaaccaagttacaagaccagctcagatttgaaaggaggaggatcgacgctatctcttgatggaaggagctgcacagaactcgtggccacttgtattcgaccacacaccttttcacctctcaggttggcaaaaataaaacagtttgataatgcatggagttgatgaggctgtgggaaaacagatactccccattgtttctcctgggggtgtaaactggtacagccctataagaggtaattttgcaattgctctcaaaatcacaagtgtggcaaaaccttcgtcattttccaaaaccactcaccacgtccaggaacttggtgcatgcgtgaaatgatatggtcacagggctcttcattgcagcatagtttgtaacgtcagatgggaaaatactaatgctacaagaggtgcacttatccagcggaaaaagaaagaagaaactcttcatgcaattcaggttacattatggccaagttcaaaaatctaggggcagaacagtgcagggaataccccactgtgcattaaaggagagaggcctgccctggccaatatgacaaaaccctgtctctactgaaaatacaagaattagccaggcatggtggtgggtgcctgtaatccctgctactcgggaggctgaggcaggagaaacgcttgaacctgggaggcggaggttgcagtgagctgagatcacgccactgcactccagcctgggcaacagagcgagagtctgtctcaaaataataataataataataataataataataataataatgaaaagaaaaagaaaagaaaagaaaaaggagaagggcatgtgtctatatttgcttgtagagtatatgcattaaataacttgtctgggctgggtgtgctggctcatgcctgtaatcctaacactttgggaggccaaggtgggaggattgcttgagcccatgagtttgagaccagcttaggcaacacaggaagactctgtccctacaaaaaaaaaaaaaatagctgggtgtagtggtgcgtgcttgtagtcccagctactcaggaggctgaggtgggaggattgcttgagcatgggaagttgaggctgcagtgaactgagattgtgccactgcactccagcctgggtgacagagctaaactctgtctcaaaataaaaaataaaatacaaaacaacttgtctgatgcccccctgccaccacatttcaagtgaagtgcagggaaatgtcccttccctgcatgcctgctcttcattcttcagtccacaagcctcgtgtttgtgcagctcctggcctgtcacccagcccgagttatcggtgacgataacatctagagagactggcttcctctagtcatgaagtgtcaggcgctgctccctcctccccaaactccagacttggctgagggactctctgtcccatcttctcacctctcctgcaccaaagggttcttggtttacctgggaaggatgtgagccaagtccccagacttctccctgccctagcaccccattgagaaaagccatctcccatccccaggctgctatctttcctccttagggttggcaccttccagagtcacctccttgattgtacacactgattgaggggccccacctgggattctgggaagcctggcaggcctgtgggtgaccttgaactcgtcctttctctcgcttgagatctctcctctgagccaagaggggaggtcaacctcaacttgtccccttagcagccttatttatattgctaaataacgatgatgatgatgatgacaacgacaatgacacagcagttactgcccactgttctaagtgctctacataaatcaactcaatcctcacagcagcccttcgatggaggtcctcctagttgccctgttttacaaatgaggaaactgaggcccagtaggtaaaatgtcttgcccaaggccacttaacttggaagtggcagaactggaatttgaactcgggttgtctggttctaaagcgttcatcacccctctggacgggtgtgtggttttcttaaagctcactactacaaatacctccaatcctaacagagccaccatta[132 bp omitted]actaaaaaaatacaaaaaattagctgggcatggtggcgggcacctgtagtcctagctacttgggaggctgaggcaggagaatcacttgaacctgggaggtggaggttgcagtgaactgagatcctgccactgcactccaccgtgggcatcagagtgagaatccatctcaaaaaaaaaaaggagggcacttacagcaatccaggccctgggctacacccatttagcagataaacacactgaggcctgaaataggggaagggacatccccagagttacacctcataggaggagcaggtggggtgtcaaagcccatgaagggtggacttgccaggcaccaggctggaaggcccctcatggggtggttgaaattgatcttattcccactgaacaagtgtgaaaatcaaggtggcccagggaggagcaggaggagaatgacacgggtctcatccagagagggcagatcaatttcccttttggtgcagccctgtgctcaagccagagacatttgggttcaaatcctggttgtgctgattttcttattatgtgcccctggacaaggccttgactgctgtgagccctggttcccttttttgtaaaagagggaaccccagggctgatttcagttgtactggttgttaaaatattgaggtatgtccagatttggttgataaaattcccctgcctggaggccttgagtgccctgatggcatctctgggtcctcccagacatcttcatattctagaaagatgagggaaagaccgggtccctggaggccaacaggctgctactctagcaagtgggcaggattgttactaccaataccctggcctgtattgacaggtggtcaaatattttgagtatcctccgtgggtggggttaatgataatggctggtaggactactgtaaggatttagtgagctaatgtgtgtaatgagtgatgaggcaacccattattattttatattattattattatttcttttttagaggagagtctcactgtcaccaaagctggagtgcagtggtgacatcatagctcactgcaaccttgaattcctgggctcaggcgattctcccacctcagcctccctagtagctgggactgtaggtgtgcaccaccacgcctggctaatttttatttttatttttattttttattttgagacacagtcccactctgtcgcccaggctggagtgcagtggtgtaatcttggctcactgcaacctctgcctcccaggttaaagagatccttgtgcctcagcctcctgagtagctgggattataggcatgtgccaccacaccaggctaactttttttttttttttgagacggagtcttgctctgtcactgggctggagtgcagtggtgtgatcccggctcactgaaacctccgcctcccgggttctagcaattctattctcctgcctcagcctcccgagtagctgggactacaggcatgcaccaccacgcccagctaattttttgtatttttagtagagacagggtttcaccgtgttggccaggatggtcttgatctcttgaccttgtgatctgcctgcctcggcttcccaatgtgctgggattacagtcgtgagccaccgcgccaggccctaattggcttttgccatccagtgttgggcctggccttctcccgcaagggtgcaaaacaagttggtaaagatcagagaagctggatgggtaagcctgaactgtgaagttagatttatcggcaaaatgatggggctcttcagtaacctcaggaaatgccttggatatagcacagagttcagctttagttccagagacataagaaatctgaggacctcagtgtcgttagacagcctggtcttaaggggataagtttttataggttgaggttgtgaagcagaaaggaaaggggtgttagtggggaaagacatcagaaaagaaagaaagagaagggttaagaaccagtagataaggcctgagagagaaagatttggggcttcaaatgcctttttttttggagacagagtctcgctctgttgcccaggctggagtgcagtggtgtgatgtcggctcactgcaacctccgcctcccaggttcaagtgattctcctgcctcagcctcccgagtagctgggattacaggcgtgcgtgccaccacgcccggctaatttttttttttttttttttttttttagtagagacagggtctcaccatgttggccaggctggtctcgaactcctggcctcaagtgatctgcccatcttggcctcccgaagtgctaagattccaggtatgagccacggcgactggcccacctgtctaatttttaaatttttttaagacgctgggtctcactatgttgttcaggctggtctttaactcctaggctcaagcgatcctcccaccttggcctcacaaagtgctgggattacaggtacgagcccctgcacctggccacaacctattaatagtaataataataataacaacatgtccccctgtccttctctggcctcactgagtagtcccaggctttccccacatgcctctcaggacttagtttccccatctcgatgctctctcagtcccctctcttgctgggtgtcccagtggccaggatggtgggtggcaccgctatcttcccggcctatttgctctccctcttccggggctgctaccctggccaaggcccttgaataaaaggcaagggcacctgtgtcctgcttccttctctcctgcctggatcatgctctggctctctctgccctgttgctcctgggagcactggctgccccagcaggtaagcgcgtcatggtccatcagaaagggagagggtcggctcaaggtcacatgtggtgttgggagtctggcttcagagtctgggccccaggtccttccaactgggctcattgtctagcaggcagaagaacagggcagctgagaacctagttctggaaccaggctgcctgggttcaaatcctgactctgtcacttcttagccgtgtgactccagacaaaccacataacctctctgtgcctcattttttccatgtgtgaagtggtgacaatgcccctgcctcagacagttgttgagacattggttgaatccacacgtttgaggagctcagaacagtgccagcctggcagtggctctgtttgagggtgagctctgctggattatccaggagcagttactgttactcttttacctcacctgcctgtctcccctttggctctaattctgccacctttgcctgagttgggaattaagtggtttggatcctagccaggacctcactgtgcgatcttgaattgaaaccctaaacccagcagctcccacttagagattctgtgattctcatctccaaacctttgtctgcgttgtttcatcgacttggaatgccattcgcactcctcacaacaaagaaggttgctgatctcccaatggccctcccacctcagcccttagtcctattctttttttttttttttttttttgagacaggatctcactctgttgcccaggctggagtgcagtcgtgcaatcttagctcactgcagcctgaacttttgggctcaagtcatcctcagcttcctaaatagctgggattacaggcatgagccaccatgcctgattagtcctattcttgaatcgtgtgtgtgtgtgtgtgtgtgtgtgtgtgtgtgtgttctttgtccttctcaaactgcagagtctgatcactgttttcttccttgcaggaagctctaagacatgtccagcctgctctttgctgtgaacctgcattgaaataacttgtccttctgcccaggacttctgcttgtttagccagatgcagctgggtgggggaccgggctggggactggacaggggctgggtggagagaatggacaaaggcagtgggtggaaggggggcatggatgagccatcctgggactggagattgccagccctgcctcatagctcagcctggtgctactggggtaaagggcagagggcagctgaacagcaaaagaggccctggattggccagggggatggctatagagtgggcagaggtcctggagggcttggaaagcaggggccctaatctcccttcctcaaactctatccctagaaaatgggactctcattgagaaggggtcatgtgtggcccctggagaatgctaagaaggtgtctacgccctgacctacagcccccatgcaagcctctgggtcagcacagcctcttgtgaaaacaactgcagccaccttccccagtaaggtttgttgggaggacctcaggctcacacaccagggtagggtgtcatggggacccagcctcaatttcctgcctcacagctttttgtctggctgattggggcaagaaggagactctcagttttctcatctggaaaatgggtgtgatgtaggttttaaagggtgttcatcccctaggctggcacgtggtagacactccttttgttgccatgtttatttgaatactgggaggctaaagagaactccaagctcttttctgtttctctgtctctctctctctctctctctctttttgagacagagtctcactctgttgcccaggctggagtacaatggcgcaatcttggcctactgcaacctccacctcctggttcaaacgattctcgtggctcagcctcacgagtagctgggattacagatgtacacaaccacgtccggctaatttttgtatttttagtagagtcagggtttcgccatgctggccagtctggtctcaaactcttgaccttcagtgacctgcccgcctgggcctctcaaagtgctgggattacaggcatgaatctctgtgccccgcctctctttttgtctttaatagaggggctccccttgaaggctagtcaaacagaacaagaaacctcacaagtggtgataggcccaggtctaggggagcccagccaggagcccaggatgcaaaaatgtttattctttattttttatttttattttttttgacagagtctcactctgtcacccaggctggagtgcagtggtgcgatcttggctcgctacaacctctgcctcctgggttcaagcaattctcctccctcagccacctgagtagctgggattacaagcacatgctaccacaccaggctgattttttttgtatttttagcagatatggggtttccccacgttgaccaggctggtctccaactcctggcctcaagcaatacacccactttggcctcccaaagttctgggattacaagtgtgagccctcatgcacagccccagggtgcaaaatttaaggagatgctcacgctgaggggatagccctctacttgcacaaccctgaaaagtcgtgcctccttaaattttgggcccctggtttcaccctagatctggccctgggtggtgacaaagatcacttttcgttgcttggttatttcttctaagaaggaatttgtacttggcagatgtagcaatggggagaggtagccatcctttcaaacaagtgcgatttccctcctcctaatttgtgtctaattgccctcctaaattgtgtctctcagcaaaataaaacccccaggttcaagttacgaggtgggcatgctattcagtatataaaatgtcaggtatgattataactgcattaattttttttttagacagtcttgctctgtcgcccaggctggagtgcagtggtacaatcttggctcactgcaaccttcacctcctgggcttgagcaatcctcacacctcagcctcctgagtaccatggctacagacatgtgccaccatgactggctaattttttttgcattttgtagagatggagtttcgccatgttgcccaggctggtctggaactcctgggctcaagtcttccacctgcctcggcctcccaaagtgctgggattataggcataagccattgtgcccagcctcggtctcaaacactccttgcagcccctgaaaacttattctggggccaggcgcagaatcactttggagggaaatgatctggattgtgggagtagaggcagtgagagagggagggcaggagaacagaggcctagtgaggaaggatggctgtaggggtgttcctcagcccccaccccgccctgactttgtccactcccaccagaggcagggcccaaggccaagcccaacactgtgaaatgtcactactgttccaggaataagtcggctccatgaactgcactgggaaacagactgcatgtgtcaccctccacgggacctggagtagaggtaagggccccttcacaggaggtgatttttgtggcaggtttcttcccacctgcacaaataaggcttgagcttcatttgcacgtgcgtcctggttatgtattgccatttaacaaatcacccacaggccaggagcagtggctcacacctgtaatcccagtactttggggggctaaggtgggaggattacttgagcccaggagttcaagaccaacctgggctacatagcaagttcccatctcgaaaacaaaaacaaaaacaaaaaaaccccaaatcactcacaaggtgggtggctaaaaatgacaatcatttaatgatctcttccagtttctttggtttgggaattcaggaagagctcctctggagagttctgagtctctcgtatgttgtagtcagagggtgttaagagctggaactgctggggcaggaacaaccaggggctttctgagcatctcttgcatatatgtaagcacaggcctttctatgtggcctctccacatcggttagattgagcttcctcccatcatggctacctcaaggctctttacatggtggctaacgatttcattcagcaaacaaagttacagctgcttggtctttatgtctcagccttggaagtcacataatgtaacttctattctgctttattgatcaaaatggtcacaaaagttccatctggtttcaagatgaaagaggcatggaccccacctgttgatgtgtcatagatttgcaaaggtatttttaaatcaccagtatgatttgcaaacagttggaggagaggccttttcagcaaaagatttataatataaccacagtagccagaggatagactaattatgaagccaatcaaaggatcgagagcagtagcctgggcttctgcttttggcagtatggtggactcaatcctctaaaaggtcttctgctccaaacagtggcacactgggaaggtggaggactgagacagtgaaatagaggaagtggcccatcatggttgggaggagcagtttatcactgacattgcttagaattgctggtactacctggtgataataaaaagcaaactgatttttagttggttttatgatttaaaaaaattctctataggctgggcacggtggttcatgcctgtgatcccagcactttgggaaactgaggcgggtggatcacttgagcacaggagttcgagaccagcctggccaacatggtgaaaccccatctctgttaaaaatacaaaaattacctgagtatggtggcacacacctgtaatctcagctacttgggaggctcaggtaggagtgagccgagattgtgccactgcactccagcctgggtgacagagtgagactctgtctcaaaaaaaaaaaattctctatagacactaagccccttgtagcctgttcccaggctggactgctcccactcccttcccctgcttggtatgccactgtttacagataaacaagatcctgtacagaaatatttttccacactttttggggttgcagaaagttaagaaaatgtccacgtgtccctaagcaaaacaaaaatgtgaacagaaatcataatgggagcagtgagaaaacatggaaggcatggtggcctgggagcaaatgctgataataacctgctttaggtaaacaggtcttgggctggcagcatgcttctggaatttagattcccacataagcaagggacctcggacagaagccaaaatgatccctggtcagtagcacctcctggcactcagtagaatcaaaagcaattccttcccagggaaaagctcccaggattcccacagatgaatatcaaccaaatatgagctcacaatcatagttcatgaaacgcacaaggaaacaagccaccatgagtgatagcagaaataacaaatcacagatacagacctgtgaggagctcagctattgtaattatcagctgtagaacatagcgtaccggcacgtgatatgtctgaaggaataaacttagaatcacaaatgtgagcaggcaacaagaggttgtaaaaactgaccaggtagatttgaaactgaatcatatagaactactaagatggcaactttcagatagcgaaagatagacatcaagttggaaggcttggactctgagcctcttgttgcaatctcatctcatttccacagggggtccccaaattctgaagggctgtgctacaccagaggtctgcaacttacatgagaatgccaccctgggtccagaagactctggatttcatctcaccgctaagcctgaatgcaactgccttactcctacacatccaggtgctttgacccctgccttcctaaaaacccaacctttcttacctccctggatcccctatgctcttttcaaacctatgtgttcccagggtgtccacatttcctacgataatgctcccaatgagtacagttacccatacacacacacacaccacctgacacactcagaagcagaacatctattggcacatatccacaaacatccacatttacatcctagcacccaaaacaaatatgcagaggcacacaaatttctaaacatgaacatactctgaacatattatgtgagtgaggttaaagatccacgttctctttaaatggatctgagcctgggcagcatggcaaaacaccatctcaacaaaacaacaacaacaacaaaacaaagccaggcatggtggcatgcacctgtggtcccacctacttggaaggctgaggtgggaggatggcttgagcccgggaggcggaggtcgcagtgagctgagattgtgtcactatactccagcctgggtgatagggcaagaccccttctcaaaaaaaaaaaaaggaagaaaagaaaagataaatctgatggtgttttccctcttttcttcacttccttgcttgtgaaagaagacagatttgccaatagtcttcttttggcttaacaaagaacagtcacaagaagttttgtcttccgcaaaagtgatatgctaattgaaatagtatttactggggccacagtttattaagcaattcaaccaactgaacagagggatagacgttttagaggtgagaaaggcaattttctctggatacagctgcattccctcagctccagagatgtagaggaaactttgtcagaaactacaccagaaaggaccattctctctctctgtgtgtgtgtgtgtgtgtgtgtgtgtgtgtgtgtgtgtgtgtgtgtgtatgtgtgtttagagacagagtcgccgtctattacccaggctgaagtgcagtggcacgatcatggttcaatgcagccttgactttccaagctcatgcaatcttcccacctcagcctcctgagcagctagcaccacaggcacacactgctacacccagctgatttttcaattttttttttagaggtgaggtcctccctacgttgccaaagctgaagaaccattctgtgatgcaaaagagagtgtgtttactggccggg[138 bp omitted]gtggctggcacctgtagtcccagctactcaggaggctgaggcaggagaacggtgtgaacccgggaggtggagcttgcagtgagccgagattgcgccaccgcactccagcctgggtgacagagagagactctgtctcagaaaaaaaaaaaggctgataggagagtgtagttactgaatttgcaggcaaagccgaaacattctcaccttagcttcttcaaatctccagctgccaggagttttccttttttaaactaagcaatggatttttttttttttttttttttttttgtgagacagagtctctctctgtcggccaggctggagtgcaatggtgcgatcttggctcactgcaacctccacctcctgggttcaagcgattttccctgcctcagcttcccaggtagctgggattgcaggtacccaccaccaagcctggtgaatttttgtatttttagtagagatggggttttgccatgttggccaggctggtctcgaactcctgacctcaggtgatccacctgcctaggccccccaaagtgctgggattacaggtgtgagtcactgtgaccagccctgagcagcggatttaattaattatcacaatgaagaaaaaaggctgacttgggagctcgaaatttacaagatggaaagaaaaagggcaaaataggaagactaacaacagaaatgtgggacgcggaatttttgcacacatgatccctgtggacacagacacagaacatatctatgcatggacacacaggctttcatatatatgacatgggaaagagacaggcataaacacccacaaacatacaaaagcacaaaatatacacaggcaagctgaaatacattaccaacatccatgaacgttcacatctgtataccaacatatatatatatacaagcacccccacaccttgatggaaacacagacacacccagccacagaaacacacacatacccataaaaccagccttatacacatacacataaacacacgcctttgtttatacagacacgcaggtaaacacctactcacacagtgtcctgcagagctacaaaaacacacatccctgacctcctgcagacagtttcagaaacacacagacaattcaacacaggaaggcacagccagatgtgcacacagacttaacaggcctgcaaacttgcacacacaaatggcattcttgcagaagtgcgcacaaaaggcacttttgcgcactcatgggcacatactgatgtgcctggaaactcagctccatgcacgtgcatgcacactggttgtcttccatccagttcatcttcctctgtccccaggtcctcatgcaactgtgacccacaccaaagctgagaccaccgactgcttcacctgctgagacctccacagctgtggcccccttccatgcccagaggataatcactactgccttcagatggcaggcatcacaggtgagtgcccatggggacagaaatagggcttggggtacagcaagacctatcctcactctcccactttgctgcctagcttcagccattgtagccttttcctggacatgcagggcagaggctagggtgcagtggagggtgtgagtttgaaatctgctgccatagttgtttaagttactgctgaataacaaactggccagaacttagtggcttaaccagtcataaaaagacaaatactgtatgatttcactgagttatctagagtagtcaaaatcattgaaacagaagatagaatggtggttgccagaggttgggggacgggggaatgggagttgttcaatgggtacagagtttcagttgtgcaaaatgagttctagagagctgttacactcaacaatgtgaatatagttaacattactgaattgtgcacttaaaaattgttaagaaggccagccgggcgcagtggttcatgcctttaatcccagcactttgggaggccaaggccagcggatcatctgaggtcaggagttcaaggccatgctttgaaccttgtctctactaaaaatacaaaaattagccgggcttggtggtatgcgcctgtagtcccagctacttgggaggctgaggcaggagaattgcttgaacccgggaggcagaggttgcggtgagccaagatcacaccacttcactccagcctgggtgacagagtgagactccgtctcaaaaaaaaaaaattgttaagaaagccacacatgatggtttatgcctgtaatcccagcacttagggaggccaaggcaggagaatcacttgaggccagaagttcaagaccagcctgggcaacatagtgagactccccccatctctatttttttaaaaaaaacattaagagggtatattttatacagtgtgattttcaaaaaaaaaatcacaattgaaaaaaagcttcttggattagacaagtatttgttatttctcacaattctgcagctgactgggctcagctgggcagttcttctgctctaagtggtaaaggctgaggtcacttatgtgattgcattcagctgggagcttgactgcacctggaatgtttaagacagctggggagagcctcgctcctctgagctctcactagtcagtttcctagcttgagcttccttatagtacggtggccggcttctgagaaggaagaagtgggaacaaccaggccttctaagggatagacccagaactgtcacagtgtcacttctgccacagtctattggtcagagcaaatcccaaggcaggctcagatttaaggggtgacgtaacagattccacctcttgatgagagagtggcaagattatgttgcacaagagcatgcaggatgggagatacagttgtggccatcttggtatctactacaacactctgggcaggcagccccacttaaggctcctgtcactctctccccatagaaggaaaagtggactcttctgtaaacgggaagaggagttgaacttgaaaccggctctttgctatctttttacagcataaagagacatagtaaagatagtgttccaggctccagttctggacatttctgggatcttagagaagtttcttactaagtccatgaggtgctcatagacagggtggggagacctcacagatacagagccaccctattaattgaaaccctaaggagagaaggcaggggatcatggaaggctttctgaactatgtgatttttaactgttgttgttgttttgagacaaggtctcactctgtcacccagggtggagtgcagtggcacaaccttggatcactgcagccttgacctcctgggctcaagcgaccctcccaagtaggtgggactgcatcactatgcctggctaattttattttattttttgtagaggcggggggtcccactatattggccaggctggtcttgaactcctgggctcaagtgatcctcctgtcccaaagtgctgggattacaggcatgaacaattgccccaagcctgaacttaatgtgtcttaatgaacaatgaccagctttggatgtattatggggagatctcaggcagagtgaatgccatcagggaaatactcagagagatttggggagttcggttgggtggtgggttgtgattgcctttcctcactagcctggcctccatctctctccaggctttggcgaaggtaaccctgtctcctggagaaacggtttctgcgtgacctccaaggactgcaaatttggcaactccatctatgccctgacctatggtgttggctttggcttctgcgtcaacaccacctgttgccaaggcaactaccaggagcccacccctctcggtatgctgtcaccagaaagcagtcagatgggtggccaaggaggtggtgggtgactctggaggcagagttgaggaaggaatgcaggaaggaacatcactcaaccccaaccaggctgccctcaggcaccctgatcccagcttgggaggaaatcccaccaaggtcatgacaatattaagttcgtgacaatgtggtagagcctaggagtgcactcggggccccgggaggtcctgagattccttctgactgaccttcatcctcttctacacagcagctcatctggcctcacacaccctgagtgagatattgtgtcctacatgtcctgggagctacttggagccctgcaattcctccttctacatgcagtgtcccagtggggaatctgagtgtgtccagctggacctaacgtctgaagaaggtaatggggacagcacatgtgtgtgtgtgtgtgtgtgtgtgaagaaggtaatggggacagcatgtgtgtgtgtgtgcacatgtgtgtgtgcacgagtgagccttagcacgttagatttggatactggtgtgcttgagtttggagtctcccctccaccctttactctgtgtagctcaaggcaagtgactttatctctttgagcctctgttttctcttctggtaattggggatggtagacacacaccttgaagggcgttgtgaggacaaagtgaactcatgagggaggtgacagagtaaagggcataagaacaggactctagggccaggctgcctgggttcaaatgctgaatccaccacctgagctgggtgaccttgaccaggtgactttgcctctctgtgcctcaatttctccatctgtaaaaggggataacttggtatgcaacaagttctttaaaaaacaggggagggccgga[138 bp omitted]gtggcaggtgcctgtagccccagctactcaggaggctgaggaaggagaatggcgtgaacccgggaggcggagcttgcagtgagccgagatggcgccactgcactccagcctgggcgacaaagcgagatcccgtctcagaaaaaaaaaataaataaaattaaaaaactgaaaaaaataaaagatctttggactcaaacagacctgggtttgtggtgtggattcacaatttatctgcagtgtagtcttggacaagtttcataacctcgtctcaaaaaaaaaaaaagaaaaaacaacaacaaaacgggaataacaacagtcgctaagtcctaagactgttgtgagaattgaataagataatccactaaactatatcagtgctttctgaaagaaatgtaatgtaagacacgtgtgtaatttaaaattttctgggccaggtgtggtagctcacacctgtaatcccagctctctaggaggccaggatcgcttgagcctggaagtttgagaccagcctgggcaacagaggcagaccctatctctacaaaaaattttcaaaataattagctgggcctggtgctacggcctgcagtcgcagctactcaggaggctggggtgggaggatcaccagagcccaggaggtcgaggctgcagtgagctgtgattgtgccactgcactccagcctgggtgacagagcgagactctgtctcatttttttaaaaaaagtttttaaaaaaggaaacaaacattgcacacgagtgaaaacacacctgtaacatacgtgtaaggtagaaagagtgacaacgagagagagacagccgtgaccagctcccagctcaaagaaaagaacattcctgatgagctttcacgaaggacatggactcgaggggctcgcgggccctgtgcgtgtgcaaggcgcgcgcgtgtgcgcttgggtgcgcgcgggggtggccttctgcctgcgcgcgcccccacgtcccctccttgcaccctgtctccgtctcggcaggcggccggaacgtgaacgtacgcggctgcggctcccgagacctgtgcagcgccctggactggacccacgggctctctgtgctcccaagacactggctgtcgagccactgcagcccccaccgccgcgccgtcctagagtcccactgccgctcgggcgccgcgcccggcctccgcctctccctcccggttctggtggtagtcctggcaaccgcgacgctgtgctaaggaatcccgcctggaccaccccgccgcccgggaggccccctccacctgcttgttcggcacgtcgctagatggtgccctggctcccctctgctggggcaatgcggagacctggaagcctctggtgagaaactcaggaagcagggatgagcttcctccctcagactagcgtttcccaaagccagaccttctgctccagactcagggcttactcaaggctaagtcctctttcctcacaccagggtcccaaaggccatgcctccatcagcctagggtgtgtcttccccgctcagactaaggccactcacctgctgctgagatcaggcgtctgctcaactaagttggggcggggcgctatacctcccccctcagattagcaccttccccaaggccaaacctcctccctcagaagagggctgttcttcttcctcaagttactaagcctccttcttcaaacgaggggatacccaatatccggctgctcccagacaccagggatgtgtctcttctcccacacattgacaagcaacttctcttttgttctccctgtttggggtctagcaaaatcctgggcagccaaggcggggcttgaggatccgatacaccctcttccaaggttttcagagcagcctcctccacccccaccatgggccaagacggggcagggggcatgggtggggtgaggagcccctcttctgtgtgggcccaatctcccagctgtaaccagatctgaatgaatcacatctcacaatgccaagtggtttgagtttcctttttctgaagttttagcctcaaagagggccctgatgtggtcctctctcctctgaggccaggggaggttaagttacttcaactggtgaacctggaggggacaaaccgacaacagtgtctggccagggtgggcataagaccaaatgctgcatctggaactgaactcagaggattgagcggagaagtgaaactgggttgctcaccacaggcagaatgccaggaaccatttgctttctgctgaaagtggctgagcgcagtggttcacgcctgtaatcccagtgcctgggggctatgacagtgggagggagggctacctaagaaatcactccaggccatgcaccagacagattaggcggcg[134 bp omitted]gaaacccgtctctactaaaaatacaaaaacttagccgggcatggtggcgagtgcctgtgttcccagtcactcaggaagctgaggcaggagaatcacttgaacctgggaggcggaggttgcagtgagctgagattgcgtcactgcactccagcctgggcaacaaagcgagactccgtctcaaaaacaaaaactgaaagtaacagaaagcccaaccgaaagaatagaaacaattcatttaacattcatctaacaaatctttatcagtcacaagctatgtattcttttgtaaatgagacactggcgatacagacaaaattctgtgctcttatggaagtggtattttagtggaggagacacataataaataaatatcacatatcgtacatcacatatcagtgagtactaggaaggaaacagtgcggggaaggagaatggggaacgctgccaaagagatatgatcttatacatggtgagtaagagcctcagtaaggtgacgtaagtaaagacctaattgaggaagtaaagacctacgtggggcaagggagaaggccatgcagttgtctgaggtgggggaggaggacattccaggcagagggaactggaaaggcaaaggctccaaggcagatgcagtaagaaacagttaatgtgggtcagacgcagtggttcatgcctgtaatcacagtgtgattttgggaggctgaggtaggaggattgcttgaggccaggagttcaagaccagcctgggcaatatagcaagatcccatctctacaaaacattgaaaagttagcctagcatggtggtggactacagg[137 bp omitted]ggaggc[133 bp omitted]aaaaaaaataaaagatctttagactcaaacagacctgggtttgtggtgtggattcacaatttatctgcagtgtagtcttggacaagtttcataacatctctgagccttgtgttcccatattgtaaggtgttattgtaaggtacattaagcacaaggcttggcccaccctaagctttcaaccaattgaaatagtcatgtcttcaggttgttaatcatgaggactgtgctattatttatccacattgtatagaggaagaaactgaggctgaaggaggctaagagactgctagtatgaagaacattgggactgaacacacatctgtctgactctagaagataaaatttcccccccttaaacattaagaaaatgtccaaatatacacaaaagtagagaaaatagtataatatctatgacagactgataccccaatctatgatgggaccaaaatgtgactgagcccagagcccatagcaggcgcccaggagatgtttgcagctggaagcagtcattaaatgacccttcagtatcaatctctcagtgtccaaaattatgcacattttgccaaattatctctctcttccttcccccttccctgcctcctcctttcctacaccttcccctcttcctccctcctcacctctctcttttgcttttttttttttgagatggagtctcttgctctgttgcccatgctggagtgcggtggcgtgatctcggctccctgcaacctccgccacccaggttccagcgattctcctgcctc[133 bp omitted]ttggcctcccaaagtgctgggattacaacgtgagccactgctcctggcctttcctttgcttttaccctccctcctttgctctttctctctccctccttcctttctcccttctttcctcctctctctctttctccctcctctccttcatacttctttcttcctttctcccttcttgccttcctatattccctccctcttcccttctttcctttttgtgctgagacatttaaagcaaatcccagatatcatatttcacccataaatacttccctgtgcatcagagcccatgctttcgactcttgtaggacggacacatcctttctgggagggaggatggaataaaataaagcatactgagagcttagcataacccacacccatccctgcctgtttgcagaaggcctagaatatcctaatccttcaggggagatctcccttcacccatggatctgtgacattcttctaaatccttcatagaaagctcatatcaaaagtgactagttcacctgtctctacaaaaaaatcaaaaattagcctgggtgtgggggcacacaccagtgttcccagctactcaggaggct[135 bp omitted]aagagacatagccacagagctcagcatagtggttcagaggatgtactcaggttccagtctgtctgggttcgaaagccaacactttgccagttactagttgtttttttgtttttgtttttgttttttacctttggaaacagagtctcactctgtcactcaggctggagtgaagtggcgcaaactcagctcactgcagcctctgcctcccaggttcaagtgattctcctccctcagcctccccaatagctgggattacaggcgtgccaccatgcccagctaatttttgtatatttagtagagatggagttttgccatgttgcccaggctggtctccaactcctgagctccggcaatctgcctgcctcggcctcccaaaatgctgggattaccaccattttgtgagccactgagcccagtcactagttcagttactagtggcctcaggtgagtaccttgacctcagctttcccatttgtgaaatgggacaatagtggttcctgctcacagagtggacacaaaggttgagagagtccacacatacacagaactcagaacagcgcctggaattcagagttcaacacaggtaaatggtggcccttactgtcattattggggagggggagtgccctttgggtcatgggtcccgtttctgtctgttacccaacatggcctcccgttgtgaaggttgcctaccccaaggtatgggtgtgaaggaacctgggggtggtgaggaaggaagcaacatctctgccagactggagtctcgggggatgggtcccggatatgacctgtcctggctgagtccagagtccatggcaggtggtcaggaaacatttgtggaaaacagtcatttaatggtcctggaatctgcaggggtaaaagggactttggggatggggtggggctaacctgggtgaagaatttgatgttattgtacattgctaattttccataggggcatacatgtaggcatattattcaagttttaaaattttactataaattatttaaaacaaacaaaaacaaataaagaataagtggagtctcttggcactcagttgaaagacaagaaacatcaaaacatttgaaatacatacccagtggccatagctgtccctggccacagctcctttcctctctcctcacctgagatcacctctatcctgaacatggtatttccaattttgccacctacaggcatgcttttgattttttttttttcagacaaggtctcactctgttgcccaggctggagggcaatggtgctatcaatagctcactgcagcctcaacctcctgggctcaagtgatcctcctgcctcagcctcctgagtagctgggaccacagtcatgtgccaccatgcccagctctttcttccttccttccttcttcctttcctttccttctcctttccctcccctcccctcctttcccctccgcttctctctcctttccttccttcctttctttctctctctctctccctccctccctcccttcttccttttttttttttttttgagatggaggctcactctgttgcccaggctggagtgcagtggcatgatctcaactctctgcaacctccgcctcccaggttcaagtgattctctcagcctc[203 bp omitted]gtctccctatgttgcccaggctgttctcaaactcctgagctcaagcaactttcctgcctcgaactcccaaggtgctgggattacaattatcagggtgagccactatgcccagccacctttaattttttaaggaaagttttctcttcttttctgcttggctctctcctcacctttctcttctctcccccacagactccttcataggggtgctcatagctcactgcagccttgatctcccgggctcaagtgattcttccacctcagcctcccacgtagctgggaccacaggcatgcaccctcatgctgagctgtatgtatatgttttgtagagatgggatctcactatgttgcccaggctggtctcgaactactaggctcaagcgatctgcccaccctggcatcccaaagtgctgggatgacaggcaagagccactgtgcctggccaactctctgcatcttgcttttctcaaccctccgagtcatttgattcaccctttctaatggctgtgtggtgtggtttccatggcctatggcatggatctaccaacatttattcagcagtcatcgtcctattgaggggaattgacgctgttttctcttttgtccctcccactatgagagatgcagcagtaaacatcctcctgacaagacagttatcatctgttatgtgtctctgtgtcctgaataatttctaatgaattttaaaagtttggggcaggtgcagtggctcacacctgtaattccagcactttgggaggctgaggctggtggatcacgaggtcaggagttcgaaaccagcctgaccaacatggtgaaaccctgtttctactaaaaatacaaaaattagccgggcgtggtgttgcatgcctgtaatcccagctactcaggaggctgaggcaggagaatcgcttgaatccaggaggcggaggttgcagtgaaccaagattgcaccactgcactccagcctgggcaacagagcaggactctgtctcagaaaaaaaaaaaagcttggatatcatatccctttcatgcatgttttaaaaaattcaaaaatgtgtaattaaatgaaattgaaagttacacttaaaaattagaagtaagaggccaggtgcggtgggtcacacctgtcatcccagcactttgggaggccaaggtgggaggaccatttgaagttgggggtttgagaccaacctggccaacatggtgaaaccctgtctttactgaaaaatagaaaaattagccaggtgtggtggcggtcacctgtaatcctagctactccggaggctgaggcagaatcgcttgaacctgggaggcataggttgcagtaagcttaaatcatgtcactacactccagcctgggtgacagagcgagactctgtctcaagaaaaaaaaaaagagagaagaagtaagaaacagtgaagtggccctcacctccccgggtgtgccccactccccatgtgccatttccatccagatggggccccctagacatcctttttcccctgcaggctccagggagtggtcaatgaaattccttcagtcatgaaaagttccatcagatagatctttaggagcaggggtgctcaactgaaggaaatgtgtgcgtttaattcattaataagtgttgtcagatttgcctcaagtgtttcatctggggccttcctgcatggagaacacctatttctctccatcaggccgaatccaacttcccagccatcccttctgcctcctcccaccctctctctctgaaccttccaaggtcacaacgtggggttctgaccagtgttgcgctgagccacgtggggcctgacacaaaaggcactatttacccatgcccctctgtcatggtttcatttttgttttgtgtttttgagacaaggcctggctctgttgcccaagctggagtgtactggcttgatctcagctaaatgcaacctccgcctcctggcctcaagccatcctcctaccacagcctccaaagtagctggggctatagacgcctgccaccaagctcagctaatttttgtagagaccgggttttgtcacgtttcgcaggctggtctcgaactcctgggctgaagcaatccgcccacctcggcctcccaaagtgctgagattacaggtgtgagcctctgcacctggccttcatgtaatttttttgtttttttgagacagagtctctttctgtcacccaggctggagtgcagtggcatgatcttggctcactgcaaccaccgcccctcgagttcaagcaattctcctgcctcagcctcccaagtagctggaactacaggcacatgccaccatgcccagctaatttttgtatttttagtagagacagggttttgccatgttggccaggctggtctcacactcctgatctcaggtcatctgcccgccttagcctcccaaagtgctgggattacaggtgtgagccaccgtgcctggcccttcatgttttttcagtggctaatttttttccagaacattaaagtagtcaaaataatattgaaaaattcttgagtgggtgtattaaaactcacgctatttcaagttaaaatattttaattacaacaatataaaatgtattataattttatttcagcttaagttaattaaaaattattgaacatcatcacttggttaagagaaattgtcaagcgtggagattctctcaattgaaaatgaaataagccaagatgtagattttgaaaacattattgatgagttatttttccatcaaagctggagtgtatatttagggcttggtgtggcattggtctttatttagaattttgatattttgttcatgaaaatatcagggctgggcacggtggctcacgccagtaagcccaacattttgtgagggcaaggagggtggatcacttgaggtcaggggtttgagaccagcctggacaacatggtgaaaccctgtctctactaaaaatacaaaaattagctgggcatggtggcaggcgcctgtaatttcagctactcaagtggctgaggcacgagaatcgcttgaacccgggaggcagaggttgcaatgaacccagatcacactccagtctgggcgacagaggaagactctgtctaaaaaaacaaaagaacaaaccatggattttttggcattaatttttattagttaaaatattgcattaaaaattgcattaaaatataatttatctcaatgactcaatttttcgcactcccttaaattttgcacccaaggccagttcctcattgtccttagttctgaccaaattgagtcactgaatgtagaagagtcccacctcactcctggcttgtttctggaaagcctgtgggttggctgggctcagctgtatggttcttctgccccccatgtggtgttggctggggttacacctgtgcctgcattcagctggagctcatctgtggctgaaatgtcctggatggcttcaagctcatctccatgtggctgcagtctctacatgaggtctctccagcacggtagcaggacctctttgcatagtagttctggagaaagaaggagaaaacaggagctgccacctgttaaggcctgggcttgggagtcccagagtgtcacttcttgtgacaaagaatgtcaccagactggcccaaatttaagggaaggggaaagagactctgcctcttgctagaaagagtggtacatgcccacagggaagggaaaattgccagtggcagtctatcccttccccaaaccccttccccaactgcccacctctatcctcttgcttgctttttctttgtttttcttatcattacttgacactatcttaattacttttgtttataagctccatgagagcaaggactgtttttgttttgttttttgttgttttttgagacagagtcttgctctatcaccccagctggattgcagtggcacaatctcgactcactgcaacctctgcctcctggattcaagcaattctcatggctcagcctcccgagcagctgggactataggtgcccaccaccacacctgactattcttttgtttatttatttatttatttatttatttatttatttatttatttcgttatttacttattttgtagttttagtagagatggggttttgccatgttggccaggctggtctcaaactcttgacctcaagtgatccacccacctcggcctcccaaagtgctgggattacagtcataagccaccatgtctggccctttttcttcttttttcttatcactacttgacactatcttaattacttttgtttattctctacatatttaaaaaatatataagctccacgagagcaagggccttctgtgtcttattcatcactgtatcagtacctaaaactgtgcctagcacctaaaaggcagccagtatttacatgaatgaatgaatgaatgaatgaatgaatgaatccctgaggactgacttcaggtttacccaggttgtggagagtggagagaaggtggaggccaccacatgtagatattcctaggaaagtgctttagaatttctaagagacacagagagaaagggcagggaggaaaggaggcttgggagtgggcagaagaaatcgttcagggactgtctttttcactgctgtgtctccagcctcgaccagccagggcctgactcacagtaggtgtctggaaagcatgtgttgaatgaatgaactttctccaaaaatccttcactgactccacccccacccccaggctgggtcaggcaacccccatggctcccacacctctctgggcagcttcaaccccattgtaaccactgtgggtcatcactgtctgaggacggaggtgtgttccctacaagactcagagtccatagggttggtgctgtctcagtcaccactgggtccccaacatcaaccaaggggttcttggaggtagtaagtatactttgcatcaacctcctctctgtggggcagagccgtcccatcactgctgtattctcaccccggagggacacagagtagacactcacaaatcaccttcattgattctaagagagattcgttttcctttttcttttcccacattttaacaattttttttaagagacagagtctcactgttgcccatgctgaagtgcagtgatgtgatcacagcccactgcagccttgacctccatggctcaagcaatcctcccacctcagcctcctgagtaacaaaccacaggcacacgccaccatgcctggctaattttaaaatttttttgtagagatggggtccccctatattgcccagggtggtctcgaactcctgggctcaagcaatcctcctgtcttggcctcccaaagtgttgggattacaggtatgagccactgggtctggctgcaattttaaaaataagacaattgactgggtgccgtggctcacatctgtaatcccactttgggaggtcgaggcaggcagatcaactgaggccaggagtttgagaccagcctgaccaacttggtgaaaccccatctctactaaaaatacaacaattagccaggcgtggtggtgcatgcctgtaatctcggctactcgggaggcggaggcaggagaattgcttgaacctcggaggcggaggctgcagggatctgagatcgcgccattgcgctccagcctgggtgacagagtgagactgggtcccaataaataaataaataaataaagacaacaatgaagtttgctgcatcacttgcctcttcctttcacaaaagatttctctgtagcatgcgacgctgtttgatagcattctacccatggcagaactttcaaaattgaaggcaatcctctcaatccctgcgactgccttatcaagtaagtttatgtcatatcctaaatcccctgttgtcaatttaacaatattcacagcatcttcaccaggcgtagattccatctcaagaaaccactttctttgctcatccataagaagcaactcctcgcctattcaagtttgatcatgagattgcagcaattcagtcacatcttcaggctctacttctaattttagttctcttgctatttctaccacatctgcagtaaatgcctccactgaagtcttttttttgttgttgtttgttttttgagatggagtcttgctctgtcactcaggatggagtacagtggcatgatctcagctcactgcaacatccgcctcccaggttcaagcagttcttctgcctcagcctgccaagtatctgcaattacaggtgcacatcgccgcgcccagctaatttttgtatttttagtagagacgagattttgtcattttggccaggctggtttcaaattcctgacctcaagtgatccacccgcctcagcctcccaaagcgctgggttacaggcatgagtcatcatgcccggcctttttgtttttttgagacagggtctggctctgttgcccaggctggagtacggtgttgtagtcattgctcactgtaaccttgaactcttggaatcaaacaattttccctcatcagcctcccaagtagccagaactacaggcaagtgtcaccacactcagctaactttaaacattttttgtagagatggggtctcacgatattgcccaagctggtctcaaactcttggcctcaagggatcctcccaactcggcctctcaaagtgctgggattacaggtgtgagtcaccatgcctggcccctatctcagctttggacacgccttcttcactgagcttaatcatttctagcttttgatttaaagtgagagacacgtgactcttccttttacttggatacttggaggccattttagagtcattaattggcctaatttcattatagttgtgtctcacagaagagggaggtgcaaggagaaggagagagacaggaaaatggccagtcagtggagcagtcagaacacatacaatgtttatcaattaagtttgttgttacctgtgggcacagtttatggtgccccgaaatgattacaatgctaacatcaaagatcaccataccagagataatgatgatgaaaaagtttgacatgttgtgagaatttccaaaatgtgacacagagacatgaaatgagcacgtgctgttggaaaaatggcaccaacgggcttgctggacacagggttgccacgaactttcaatttgtaaaaaccatagtatcaggccaggcggggtggctcatgcctgtaatcccagcactttgggaggccaaggcgggaagatcacttgaggccaggagttcaagaccagcctggccaagatagcaataccccatctctattaaaaataccaaaacaagccgggcatggtggcgcatgcctgtagtcccagctactcgggaggctgaggtaggagaagcccttgaacctgggaggtggaggttgcagcgagccaagatcataccacgcactccagcctgggcaacaagagcaaaactccgtctcaataaataaatgaataaataaataaataaaacaagagttgggcatggtggcgcgtgcttgtggtcccagctacttgggaggcaaaggtagtagagattgcttgagcccaggaggtggaggttgcagtgagcagagatcacgccactgcactccagcctgggtggcagaacaagaccctcttctccaccacatccccgcccccccgcaaaaaataccacatagtatctgtgaaggacaataaagctgcatgcaataaaatgaggtgtgcctgaaattgagtttattattgaacgaatgaaagttctctctcaactcaggttctttgcagaggctggtcccttagcctgggatgcaactccctaatgtgccatctggctcactcctactcatcctttggatctcaggtcaggtgccccctcctccaggaagccctccctgactcccaggctgagtcgggcttcctcctttgtgctcccacagccctctggggtcccccatcccagtgctgccccctctgtcatcattatcttgggatggatctgactccaccactggactctgagtcctgtgggggcagagcctggctgtcttgtccattgctgcgtttccagcatgcagataggcagggtgcaacccctctctctctggctggtgctctcaggagctgctaggggcatccctgggaacatgccagtctgcatcggtgcatgtgtgcaggtggcagtggctctctttcttggtccacaatcatcctgggctgcaataatctccattttctcgggcctggagcccctgaagcagtgcctgggtttgatgcatctctggagccctagctgctgcagcagaatgaatgaggttcctgaatggagtcagtgggtttcggggtttctgtatatgttgtcagtgtgtaactgtgtctcttaaagtctgcacatctgtgtcccggaatgtgtgtgtttgcgaggctttggtaagtgtgtgtttgtctgagtcttgctttccttcagtgactctgttgttttgtttcgtttagagacagaatcttgctcagtcacccaggctggagtgcagtagcatgatcacggctcactgcagccttgaactcctgggctcaagcaatcctcccacctcagcctcctgagtagctgggactacagatgtgcaccatcat[186 bp omitted]gcggtggcaggcgcctgtagtcccagctactcgggaggctgaggcaggagaatggcaggaacccgggaggcggagcttgcagtgagccgagattgcaccactgcactccagcgtgggagacagagcgagactccgtctcaaaaaaaaaaaaaaaaaaaagagatagggtcttgctatgttgcccaggctggtctcaacctcctgggctcaagcaaacctcctacctcggcctcccaaattgctgagattacaggcgtgagtgagccgccatgcccagccacgaagtaactctgtatttgaggctctttctgtgtctttcccttctctcttgggccaggggtgcgtgtccatgcattttgggaaggagtccttgctgtctgctggtctgtgtgctcggtgtccggggaagtctgagaaccatgttgttcactctcttcagctctgtgtgtttgtgtcagtcagtgagagcatgagtgagtcgtgtgtcttttgccctgcacctccctttcacctgtggcttaagaactctgtactatgcggccaacagcccactcttccccagctctcagggtggctctgagctagtctattccccttctgggcctctctctccttagttgttctcagaggctcctttccagaactggcctgcagatggtcaggaaaatcctctgagtagcgttattgtaaattccctacaagaggagaatggagaaggccctgtggagcctggcctgggcagagaggaagcccggaggggagacaggacagagacacttataaaggacaagaaggggccgggtgtagtggctacacctgtaatcttagcgctttgggaggcggcataacctgaggtcaggaggtttgggaggcgaggcaggcggataacctgaggtcaggagttcaagaccagcctaggcaacatggtgaaaccccacctctactaaaaaaaaaaaaaaaaaaaaaaaattagccaagcctggtggtgcatgctagtagtcccagctactcaggaggctgaagcaggagaatcacttgaacccaggaggcggaggttgcagtgagccaagattgtgtcactgcactccagcctgggtgacagagcaagacactgtttcaaaaaaagaaaaaaaagaaatcaatgactaaattattgggcttacaagatagcagatcagcctcccgagtagctgggactacatgcatgcaccacatctggctaatttttgtatttttagtagagatggagtttcaccacattgcccaggctgatctcaaactcctggcctcaagtgatgcactcgcctcggcctcccaaagtgctggcattacaggcgtgagccactgtgcccaccagcaatgaccgaatttgtatcatcaactttcacacttctctggggaactgacagtcccctgggtggagggtggagtggtagcagggccaagcccttggaaaccaatctgtgaatctgagactttgtccttggggggtgatggagaccatggaggattttgaacaggtcttggtgttagaaagatctctctggagtcttcaggggaactggagggcccagtgtgagtgggtggtgaccccatgagcagctggggcttggggtccctgctccacctccgggccccaccccctgacatcactgtcgcattattgcaccaggtctggctgaccaataagctgctgcttgctatgataatgggtcctagcaacggtgtctgaccttggctaagagggaaggagatcctatcagtggggagagtgtgaggggagagggagagcctgcagggcaggtgagtcccccagggctctctcgctgggcccctgtgcgtgggcggagcaggagcttatggtctaatccggaccccctcagcccaaattccaaccactgacttgtctgccccttgctgccaggacctgttccaggttcctactcttcccaccgcagaccatactagggagagggcacacccaggataggaggctcag[136 bp omitted]ctacaggcatgcgccacaacacctggctaatttttgtatttttagtggagatggagtttcaccatgttggccaggctggtctcgaactcctgacctcaagtgatccacccacctcggcctcccaaagtgctaggattacaggcgtgagccaccatgcccagccgggaacaatgtcttaaggacatatttctgtggggggtggagtggggtagcagaggatggggtgagtggtaggaggtgaagagacggggtgcagggggcaaggagacaatgcaggaggcagggacatgcagctgaagggagagtagctctctaggtgggtgaaggagcctggggacctgggttggggtcctggctatgcctctggatgaggagacctcatttgtcttgtctgagcctcagtccttctccctgtcaaatggggacagtgatcccagacatgagcagctctcccagggcaccctgaagacccttagtgagtaaatgtattttagagatgatgggccagaggagggtgagtgggaagagggaggaccagggaagctcctggtgaggaggagggatctgaggggggaccatcacgacaggagctctgggcggtgggaggggaactgaaccccgggaggcaagggctgccatggcaggggtggggtttcatggaaatgactcctggtgtccaggtggtccccatgtctggcttcccgaacccaagggcgtctgaacccaaagtcagcctagggctagctgaacggggtttgtgggcatcacagcagccctgcgaggtggggaggagtatcccccacggggcagctgaggctcagacagggcgaggacttgctcaaagtcacacagctaagaatattactaatgataagaataatgacgatgatggtgatgccaatgacacgaggcacctgccctgagccaggcgccgttttatgggctgctttatgtcataactcattcaagtcacagagatcctaggaggtggtttgccaggattgtaggtatcattctcagtgttcagatgaggagagtgaggagagagttaagtaacttgcctcacatcactcagtaagtatgtggtggagccaggatttgatcccaggcagtctggctccgggtctgggtcccctccaccctaccctccaatcccagccaccgcaggagtgcagctgtttcctctgaatgggcctgtaccaccctttcctatgcagccctggctatgtaatttgccctggctatataatttgcaaggcccagtacgaaatgaaaatatggggcccctggttcaaatattataaagaatttcaggccaggcatagtggctcatgcccttaatcccagcgctctgggaagctgaggcaggaggaccttgatctcggaagttcaagaccagctgggacaacatagtgagactcccatctctacaaaaaatttaaaaagtagctgggcatggtggcatgcgcctgtggtcccagctgttcaggaggctgaggtgggaggattgctagagccaaggagatcaaggctgcaatgagccatgatcgtagcactgtgctccagcctcgatgacagagagaccctgtctcaaacaaacaaacaaacaaacaaacaatttcagctagtgtcagcagagcattaaaccaagcactgggccattctaagcacagaaccctccagggcacacatacacccagaaaactgacctgtgcctaggttaccctggagactccaatagtgctccaagaggctgcttggtggtcatgcccattacccagagaggtgcttcattttgcccctggtcacacagcaagttagtggcagaaaagggatgtgaacctgggcctgccagaccccaaagccctctaacttgtgccaaaaatgtgtccccaattcttgaaggaaaaagagagctgtgggcttccagggcgactcccttcacatccgtggtatctgtctctccctgccccatgccaaggcccaggaggtgtgaatggctcccttctcctctgcaggcgctgaggatcacgcatcctgtgactctcccctgtcccccgccaccctctgaaccactggccaccatggctacttcaaagttgcccgtggtgcctggggaggaggaaaacaccatccttatggccaaggaaaggctggaggccctgcgcacagcctttgagtcgggtgacctcccccaggccgcctctcacctccaggagctgctggcctccacggaaagcatccgcctggaggtgggcgtcacgggcgagtcgggcgcgggcaagtcctccctcatcaatgccctgcgtggcctggaggccgaggaccctggcgcggctctcacgggcgtcatggagaccacgatgcaaccgtcgccctatccacacccacagttccctgacgtgaccctctgggacctgccaggagccggctctccaggctgcccggctgacaagtacctaaagcaggtagacttcagccgctatgacttcttcctgctggtctccccccgccgctgcggggccgtcgagacccgcctggccgctgagatcctgtgccagggcaagaagttctactttgtgcgcaccaaggtggacgaggacctggcggccacgcgcacccagcggccgtcgggcttcagagaggccgctgtcctgcaggagatccgagaccactgtgccgagcggctgcgggaggccggcgtggctgaccctcgcatcttcctggtgtccaacctctcgccggcccgctacgactttcccacgctggtgtccacctgggagcacgacctgccctcccaccggcgccacgctggcctgctgtcgctccccgacatctcgctggaggccttgcagaagaagaaggccatgcttcaagagcaagtcctcaagaccgccctggtgttgggcgtcatccaggccctgccggtcccagggctggcggccgcctacgatgatgcgttgctcatccactcactgcgtggctaccaccgcagctttggtctggacgacgactcgctggccaagctggccgagcaggtgggcaaacaggcaggtgacctgcgctcggtcatccgctccccactggccaacgaggtctcgcctgagactgtcctgcggctctattcccagtcgtccgacggcgccatgcgggtggcccgcgcctttgagaggggcatccctgtgtttgggacgctggtggctggcggcatcagctttggcgctgtctacaccatgctccagggctgcctcaacgagatggctgaggacgcccagcgtgtccgcatcaaggccctggaggatgacgagccgcagccggaggtcagcttggaagtggccagtgacaatggcgtggaaaaggggggctccggggagggaggtggggaggaagccccactctcaacctgcaggaagctcggcctccttcttaagtacattctggacagctggaagaaacacgactcagaagagaaataaagagtgcagccccgcccccctgcctcacccacaaactaagtcttaacaaaatccaaattaccaacaaaaaaggccgatgtggtgaatgtgagggctgcagttgcctggggggtgggtgtggagggagcctgtgtccctggcaggcaggggagccggcgtcctgggcagggcaaaggagggggcactggggaggggaggagggaggcaggtgggcccagggccaacaggggtgtagtgaaaggggacaggagtgccctggagagggaggttggagacatggatggtgggcccagggttccctggtggtgtctttctccctggtccccaagtggccaggaggaatttgtggggcacaggacagcagggccaagacaggagattgcatcctgctaaggtgctttctattttattttattttattattattattttttgagatggaatcttgctctgtcacccaggctggagtgcagtggcccgatctcggctcattgcagcttctgcctcccaggttcaagcaattctcctgcctcagcctcctaagtagctgggattataggtgagcaccaccaagcccagctaatttttttttttttttcgagactcagagcccaggctagagtgctgtggcacaatcttggctcattgcaacctccacctcccgagttcaagcaattctcctgcctcagcctcccaagtagctgggattacaggcacacgccaacacgtccagctaatttttgtatttttggtagagagggggtttcaccatgttggccaggctggtcttgaactcctgaccttggcctctcaaagtgctgggattacaggcgtgagccactgcacctggcccctgctaaggtactttagtttcaatctcatgtccgtgtctgagaacccagtgtaccaaagacagccccaggggcctgggatgagcacagtggtgtccagcaatggctaaacaggttggggagagtgggcatccgtgcctgcctgctgcctgggagccatggaggggtagggggtggcagggagagggaggccaggcggccacagggctcacctccgtgtggtgcttgagaagacagagaatggcatggtgagagagtgactggatgtttccatgaacatcggaggagagaggaggccgacgatgcaactccgtggcctagcatgagtcttactccagaaggagggcgggtgtgtctcagagcaggaaggcacatggtgttgagacatctggcgtgtctgtgattgggaagaatcctggtctctccatgattaaaaaaaattttttttagagacagggtcttgccctgtcgcccaggctggagtgcagtggcgtgatcacagctctcttcagccttgacttcttgattttgatgctgtgagtctaagattgtgactcatttgctgagtctggggtcacctgtctctgtgggattgggtcggggtgtgcgcgtgtgaatactgggacctgctgaaaggccctgggtcttaacgggagggcaactatgtgttgagctttctgaccagactggtcaatatggagaaaccccatctctattaaaaatacaaaaattagctggtgtggtggtgcctgcctatagtcccagctactagggaggctaaggcaggaaaatcgcttgagacctggaggcggaggttacagtgagctgagactgtgactccgcactccagcctgggtgacaagactctgcctcaaaaaaagaaaagaaaaaaaaaaagctaagtttagagattcatgtctacatttttatttttcactttgacacactcaaacctaactttcccctgctcaagaccaaattaaaaagtaaccataacaataaaagtcataacaatgcccagagtgtctgaggcatcaccaataataatactgagagtgtaaccacacgcaaggctaagtactttatattagctaacatttattcatcactgctaggtactcctggttcataacaccctggaaaagaagcttctcttactgtttacatttggcactgagagaatgattaagttgctcggccaggtgtggtggctcatgcctgtaatcccagcactttggaaggctgaggccggtggatcacctgaagtcaggagttcgagaccagcctgaccaacatggtgaaaccctgtctctactaaaaatacaaaaattagccaggcgtggtggcaggcacctgtaatcccagctacttgggaggctgaggcaggagaattgcttgaactggggaggcagatgttgcagtgagccaagactgtgccactgcactccagcctgggcgacagagcaagactctgtctgaaaaaaacgaacagaaaacttacccaggctgttgtagggaggtgtcaaccagtatttgcccaagcttctattatctaattatgacattgctggagaccatcaacaattaaaggattaggagcataaatatttttgcttttttttttttttttttttgtgagacaaggtctcactttgtcatcaggatggagtgcagtcacatgatatcagctcactgcaacctccacctcccgggttcaagcgattctccaacctcagcctcctgagttgctgggattataggcatgagccaccgtgcccggctaatttttttgtacttttagtagaaacggggtttcactgtgttggccaatctggtcttgaacacctggcttcaagtgatcctcctgctttggcctcccaaagtgctggggttacaggtatgaatgaccatgcccagcgtatttttgcatttagttaaattctggttttgggcagttttaagatctaatttcaatgtcttttctgtagactgcagtcacttttggggtgaaacagggaatctgaacatgtatgtctcaaagtttgactttgtggctgggcgcagggctcatacctgtaatcccagcacttagggagtccgaggcagcaggatcacttgagcccaggagttggagaccagcctaggcaacatggcgagaccctgtctctacaaaaaatacaaaaaactagccaggcatgtggcacgcgcctgtaggcctagctactcaggaggctgaggtgggaggatcacttgggcctcagaggtcaaggctgtaatgggccatgatcgtgccactgcactccagcctgggtgacagaatgagatcctatctcaaaaaaagaaaaaataggctgggcgcagtggctcacgcccgtaatcccagcattttgggaggccgaggtgggcggattacttgaggtcaggagttcaagaccagcccggccaacatggtgaaaccccatctccatctccactaaaaacacaaaaattagctgggcgtggtggcaggcacctgtaatcccagctacttgggaggctgaggcaggagaatcgcttgaacccagtgggcataagtggcagtgagccgagatcatgccactgcactccagcctgggcaaaaccccatctcaaaaataaataaataaataaatatgaaagatgtggatacagaagtcaatgccctttagtttggcagcacagggattggtgagaaggacttaatgtggctctttctggtaaggctggatagaattcttgcgtacgtgtcttttccaatagacaaagtcgccaggctgcagatcatggtgttgtaggtctttgtctcctatgattgtgctgtggaaagattgttctatcaaaatatgatttctatccattgctttattaatgcctttaccttagtaaggctttattaatattgaagtatgtctgttttgtttttttttgtttttttgtttttgttttgagacagtgtctccctctggtgcccaggctggagtacggtagcgggatcttggctcattgcaacctctgcctcccggttgaagtgatcgtcccgtctcagcatcccgagtagctgggactacaggtgcacacacaactacacccagctaatttttgtgtttttgtagagacagggttttgccatgttacccaagctggtctcgagctcctggactcaagcgatccccttgcttcagcctcccaaagtgttaggattttacgagtgtgagccactgcacccagatggatatgtctccttttatcaattaagggtcaaaagcagaggaggccaagtgcataggatggcctgtgactatttccaaaggtgaaagtttatgagccccaaagagagtggcccttagatttaataataccaaaggaggaacttaggtcaaggaaggtgtagataaattctgccaactgggttttttgtttttttgttttgaaatggagtctcactctatcacctaggctggagtgcagcggcttgatctcagctcactgcaacctctgtcccctgggtttgagcaattctcctgcctcagcctcccaagtagctgggattataggcgtgtaccaccacacctggctaatttttgtatttttaatagggatggggtttcaccatgttggccaggctggtcttgaactcctgatctcaagtgatctgcctgcctcagccttccaaagtgctggggttacaggggtgagctactgtgcccggccatccaactgggtttttatagttccccttgtttgttccactgagccagaagattggggattgtagacagtggaaatgctgagaaattggccaaactgaactcacttgttttattatatggccagtaaaatgggctcctgatcacgatgtacttcaaggggagttccctaggtgggaatactttttttccaggagaattttggccacagctgaagcagtggcttgtctaccaggaaagcctctacccaataggagaatgtgcaaactgttactagtacatatatatatatatatatatatatacacacacacacacacacacacacacacacacacacacggaagtgggtagttggataaaatccatttgccaaaccttgaagggcccattaggtagattaaaatgtccaggatcgggatgtacacattttcctgagttaaacttacggcaggtggcacaagtgccaaataggcttttttttttttttttggcagcttttttttttttttttttttttttttttgagagagggtctcattctgtcactcagactggagtgcaatggcacgatctccactcactgcagccttgatctcctaggctcaggtgactctcccacctcagcctccccagtagttgaaactacttattttgatatttttagtagagacacgatttccctatgttgcccaggctggtctcgaactcctggactcaagcaatccgcccccttcggcctcccagagtgctgggattacaggcccgagagccactgcacttggccagtacagcttcttttaatgtcactccccctaatattgtttcataaaacaatttgtaagttccccagtgggtcagattatgtactgtagttaagaatattgacttggagagaactggttatcaggccttaaacacagcttttttttttttttttttttttttttcaaatcattgaactagcagtgtgatctttccaattttgttcttccgtttctggtgcccaattttgtgcatctttggtaatcatttttagatcaccttttggtggctcttttagctgggcctcaagagagatttgaggaaccgaacctttaacagcagcatcctttgcggcattatcagccaagactgtttcctctagcttccgcagaggttaaccttgaatgtccgggagtttccataatagccaaggcagctggcagctggatggcatccagtaagtcccgtacataggatccatttttaatttgacctccagtggacgtgagtaaaccccttcatttccatagcagtccaaaatcaggagcaaccccaaaggcatatctactatctgtatagagtaacagattgccctttcacgaggaggccagcaagggcagtgagt[131 bp omitted]aaaccctgtctctactaaaaatacaaaaaaattagctgggcatggtggtgggtgcctgtaatcccagctactcgggaggctgaggcaggaaaattgcttgaatccagtgggcagaggttgcagtgagctgagattgcgccactgtactccagcttgggcaacagagcaagactccatctcaaaagaaaaaaaaaaaagtagccacaggtaaggggcggcttcagcaacttcgaaggaagtggtaactacatatcttacacagtttttaccattgtcatctttcagatacgatccatctatatccatagttcagccagttcagcattatctagcggaaattcttgtaaacattttttagggaatcaaaagatagtgtcaaacagtcatggagagctgtgtgcagtggctcacacctgtaatcccagcactttgggaggccaaggtgggtggatcacctgaggtcaagagttcgagaccagcatggccaacatatagtgaaaccccatctctattaaaaatacaaaaaattagccaggggtggtggcgggcacctgtaatcccagctactcgggagactgaggctggagaatcacttgaacccgggaggccagaggttgcagtgagccgagattgcgccactgcactccagcctgggcaacagagctagactccgtctcaaaaaaaaaaaaaaaacaacctgtgggcctatgcctgtattcccttaggctttcccatggtggttgtggattggctattttaaagaaaacacgcttgaagggggaacttatttacatcgctctgatgttgaccatcccatagggccatggtcagccactgtaggatgttgttggattttggattggtgagatgaggaacaagtgggctaaactgcaagccacaaggggaaggggaagttttactaggccaaggtgatgaggtttcgttgagtttcaaacaatgtatgtcaggcctaaaagtggatgccaaggcagcaagtatattgtaacacatttatgacaggcatgcagagggattggagaatgggtaactcagggtgaaaatactccctcccctgttctgctaagggtcaccacgttctgaagctggagaactaggggtcaggcaacccatggcaagtacagcccagccagccctcagccagttcaagatactgatgctgtcgtgagaggcagccagggctctgacggaggcccgcaagatggggaatctgccagcagttgctgccaagttgcaggccacactttgttcacgggagaatgcaggctgcacgctggcactaccaagggcacaggctcaggcaagttgacctgtcaatatcatgagaggctacgaaataaagaccctaactcagcctgcatggctgtgatagaaatggctgtggaccctacaccctacccgcacccacggtcatcatcagaccggccaggcataggcacgcccactttttaggctgacaagtacctccagcaggtgctgctggaccgttacatcctcattatcattgcatcagagcatttgaccaccggccatgcccagctggctcgcgagatcctgcagcagggcgtttctccttcctctgctccaagatggagtttgccacccccaaagctgccaccccagcaccttctctgaggagagtgggctcagccagatcctggatggctgtcaacagtagctggaaggtcagggacatgctctggggtactggtggcagagaaggagagcctggacccttgagatactgcccaccccttccccttcgtcttccagcagaggcccagagtgggaaaagaggtcacccccggtaccagcgcatgactgaactagactttgtagtgaaataatgctttttagctgccattccctaacagtcggcacttctcagtcactggtgatagagaccaatcgcttgcattaaggagaaagagtatgtattggctcatttatttgcaaagttagaggattgcaaaatgctatgtgcccaatgcagacctggcacctgtggatgatggtggcatttaacatttattgaggctcagcataggtcaggcactgatatggtttggatctgtgtccccaccagatctcatgtcaacttgtagtttgtagtcaccactgttggaggtggggcctggcgggagggacggcatcatgggggtggtttctcatggttcagcgccagccccttggtactgtcctcacaatagtgaatctgttgtaagagctcgtggtttcaaagtgtgtgccacctgccccctcttgctcctgctctgggcatgtgaagtacctgctcccagttcaccttccgccatgattgtaagtttcctgaggcctccccagaagccgagcagatgccagcaccatgcttctggttcagcctgcagaactctgagccaattaaaccccttttctttataaattacccagtctcaggtatttccttacagcaatgcaagaaccgactaaaacagacaccattatgaactcaattaatcaccacaacacccctaggaggtaggtacaatcatcaccttattttgcagacaaaacagatgcccagcaagctttagcaacttgtccaatgccacacaggtggtagatggcaaggctgggatctgaacataggcagcctggctgcagggctgacattcttaggccaagtgctgcgctcatgacaggcgcttgagcccaggcagctgccagcacaacatggcctgctccagtgtagaagctgattgagcggtgctcatgtttcctgcagtggagggtgagaaggataccaatgtattcctgtgtctgaattgaaaagcgtgagttccacctgctgggaatgatgaagggactggagagccacaagcagcaggcattcctggtggccaggcccatcttgcagcccatcctagagcagaaggcctccctgcagcagtatatctagctggtgtccacagtggcctgctggcagcatcagcctgagtcctctgctggatgtaaagggggtggcgggtgaccggtacatacttacccactgttcagaaggctactgccagtttgactcctctgtcaaactgcctcaacgagccagcccctgcacaaaaccctggaggtgggacagggcctttggaccaaggtcaccagatcaccacggtggtggtggtggaaacgctaggccggatttccagagtgcctcatttcacccatccgggcatcctggtcacctgcagcacctccttcaccaccatctaccggatgcttcacacgcccctggatttggcagccagggacaccaagagtgtgctgattcagaccttccttggcaacactgaccacaagatcacaggtgaatccaatcaacaatctcagccctgagctgggccagcaggaggtggtaggttagggctgggagggcacagttctctctgtccccagccttgtgctgaaaggggctgggatggaagaaactgaagctccaactctcctggactgagttgcatgctgtctggtgccgtcttgccttgggtctcccatctttctctggccgttgcccccaccacctttcctactctggcaaacccccaaatcaaccagcaggaagaccccctggggaagcaggggtggggatgagacttggggcagacattttgacaaggcagggaagagctgggttatctagctggagaggatggtcaggagggttctgtagagatcacgacagtggggcaaaggatttagaagcatttcggtaaaagggcagtgaatgtcacagctctgaagggcctcgaggatgatcttaaatgttggaataatggccagagaggggaggctccttgcctactacagtcggtcaggaagtggctgtgccagagcctgtgctgggcctcctgtctcccaggcctcagccctctgtagagactggcattctatccacttctggcctgaccttctctggccctgctgagtgctttcttcactgaccccccgccccccctcacttcagttgtttctcacaaggccctggatccccatggtatgaaacaccagggctgtatgggatgcttgaaagcaggaggaaaccagggagacaaatatgtgccacgggcggcagggggtgggggagggcaatggatgaacagactcagccagctggactggagctgactgctttactgaacgatggattaatttggggtggcgagaccaatttggagacatactttgggaaacctcaaactaagatcatgtactgtatttaactgagcagatgagggttggtactgtaccaaatcgcagagtggatttaactgagggtaggttctggatttacattaaaggtgagggttgccatttctaagcaagagtagatgaggtttacgagaggaaagccactgtatttaaccaacagaaggcactgtctgtacgggtgaggcatggtatttggattaagggtaagtacttactacatttaaggacaagttctgtttcttaagtcaaaagtaggctttttttttttttttgagacggagtctcgctctgttgcccaagctggagagtgcagtggcgtgatcttggctcactgcaacctctgcctcccgggttcaagcagttctcccacctcagcctcccaagtagctaggattacaggcgtgcgccaccacgcccagctaatttttttttgtatttttagtagagacagggtctcaccatgttggccaggctggtctcgaactcctgatctcaagtgatccgcctgcctcggcctcccaaagtgctaggattatagacgtgagccaccatgcccagcctaggcactgtatttaactgggcatttaacccaaaggcaggtaactgtctttaagtgagagcagaagacacgagggtagttgctgtactcagctgcaccagtgtattttcccatccaaaacatacacaggggaggcttgatgccaccccaggaaacagaataaccccttctagggacttcttagcagagactgatctccatctgcccgcaagggctgggtgtccaatttgtcctgcttcccagagctgcatggtgggtagaggagtaagtggaacataagaacaggcttgcatgactgtgtttatttgaaccaccagatctgttccaataaagagctctccagaccctgcctcaccttacagggaagggcttagagtcagggaagaggggcctgttgctcctgtccctgaaaaaggaggtcaagatggagcccgggcttcctggtgaccattcagactcctcccactgcttgtccctgtggaggacacaggacgggctaccccatctcaggtttggggtgggatcgctcacagtcacccccggaacagccccaactgagggtggggggcctggccctggacacctcatgtctctgggccgggaagccacgatccctcatccatcaggcctgctgccgctctccaccccagcgggggatggacatctgtgctccctcgcagtacactgcggacccaggaggtcccctgcatgacattcctctccttggcctcaggccagcaggcggctgtactctgccagagcagaggactttctcaccccatcccagatccgggcagcgtagtggaacctgtgaggaggccaacagtcagggctgcctggccggggctccccccagcccagcaccaacccgggacaggtggagaaactgaggccccttttatgacctgagatgtgactctgagcctcttggaacccaatctcctcgactgggatacagggaggatcctaacagtgatgggaggtggcccaacttttcttagctcacccaggttatgcaaagctgaaggttccagggcttggactaagacctcaagtctccaccacctaaacttctcccactccacacagtgctggctttgtgggtgagggttcagtttccacctccctccagagtcttacgacatagaaaacatctaacagcagctgcacaacccacaatcttctccctctctcctctgggtcctggtttagaccaatggcaggagcagagctgggactcaaagctctgccccatctctgccctacaagccctgaggggcttcctgctgctttgtctgcactcctgaccccttccaggcacagccaactgcaaacagatgtagggagccaagttagagaggctgcacccagttaagctatttatctttccaatttttctctttgaagtaagatgaggaagacctggactcatatgctgagagctctggacaaagaagtaatgtaaagtaggggccacagagctagtgccgggccaagtgaaagcagggagagaaagccagaggcaggaaacaagacaaatgcagaagtgtgaagaatgagaccctgatggcttcctggttcccatctgctgcagggccctgctttctgtgatcaggtccctggaataaatcttccttaagctaaatctggtcactggtcctactcctagcaatcaaatgactcctagccacagatgtgtggccttgctatgtaacacttttccccgagcctaaatttccccaccaggaaaactggtgacaaggacctacatgatgctggctgattaggaggattcaaagtcacaggaaacagcatgttgccacatgggtgagatgcttacaagacagtagcaatcatcactgttccagaaaaggaacctgggatctggagaggaggggcttcacaaggtcatgccgatctaagggacgcccccttctctctacaccagggtggggtgcctcaaattgaccccctctgcaaagagctcttaccagttcttctcggtgaggatcgtgtgtgacagctgtggccgggccatggacatcacttggctccggagcttgctcaccaaggactggaaactggggtggccacgatacccaggcagcagggagaagagtgggctggaaccaggtcctggaaagttggggcagggagggtaagagggatagactgccagggtctttctcccagttaacagcatcctgggcttcaaggagcacctgagagttcagccccggctgagctcttcctgtacttctatgactctgaaacacactcctaataaagggtccacacaccccaggaacaaaccaggatcttctctcagaccaggtaggctccacactgctcccaaaccagggcaacccatgtcgcctcctagaccagtgggtgctgggtctctctctgatcaggataggacttgtctctccatgaacctgttgagggtaactgtacctgctcttggtgggttttcactctctgcttcactgtccatgaagggtaccaggaataagttgacctcagagtccaggaagtcaggtggaagccccgggaagacattgcattgtaacatggacagagttcctggaggagaaaacgcttcagccttcaggtaccatgttgtgggtttggggagtgggaattgttgacagtcaaagcaggatcaggagactagtctgggggtagagactgacccacggggttggatcaggaattaggaggctgactagcttggggggtgatgtgggaacccttacccttgtaacgcaggtgggagtgggccatgagctggtcaatcatcaggtgcatctgccgcagcttccgaggacagaagtcctctcggcgagctttgttctgcaagaagactgagggtgggaagagacgggccctgtcaggcagacatcgcttggcttcatggactcccctttctcaccccaaagacctgttgttacccctgagttcagatcactgtgtaaatatttatataacttcacttcactttagcaccaggctctgtgtagggcaatgctggggacccagaagtgagtcaggtctgatttctgcccctagtctctttgaggccctagcgagggatcataaaatgaactgggtctttgaagaagagtagagcggagaaaggatgaaacaggcaaaggaacggcatgtgcaaaggctagaggagggagaacaggtggacggggccacccagatgaacccaacctaatactcacttcctgagttgggagattccagggacccagaaataggcagacctggggcctgtcccattccagacacaggctcaggggtcatgccctcaactgtcaggattggaccagggcagtgggaacttggaaggagcagctaatcctttttgactttgctcctcacaactctcaaaagtgctccacccagaaccccactccttcctctctctcccctcttctccagcgtgctcctgactttcagcccctcatttttcctcctgcccacccctccagtccccagaaagcctctcacctaggtgggggtagtactcggtgccttcatcggagcccgatgagctgctggactcgtggctgggggatggggtggagggcttcaccatctctgctgtctgcaggaaccttggggtttggggtgagtggctgttgctcttgcacttgcaccccaggtcccacagcctgggacaggggcttcctttgagattctgatgaaagctacagccatgctcagaaaaataccatatacacaccatgtttctcacaatttcagagaattcagagataatcctctcagataccaacccatggacttaccaactgtataaattctttgagtttactgtattttttttttaaaggctattttttagagcagttttaggttcacagcaaaactgagcagaaagcacgtagcgttcccacacaacccctgcacatgcacagcctccctgactatcaacatctccaacctgaatggttcatttaagatccatgaagctgcactgacacatcattatcacccaaaatccctagtttacatcagggatcactcttggtgctgtacgtcctacaggtttggacaaatgtataaaggtgtgtgtctgccattatagcatcacagagtagtttcactgccctaaaaatcctctgtgctgtccctattcatccctccctctctccaacccctgatctttttactgtctccgtagttctgccttatccagactgtctgtatagttggaattacaagtatatagcattttcagattggcttcacttgatctgcatctaatgatcctctatgtctttttatggtgagatagctcatttcttttcagtgctgaataatattccattgtctagatgtgccactgatgatttatccattcgatttactgaaagacatcttggttgtttccaagttttggcaattatggatacagctgctataaacatctgtgtggccgagcacggtggctaacgcctgtaatctcagcactttggggagctgaggcgggcagatcacctgaagtcaggagttcgagaccagcctggccaacatcgcgaaactgtgtctctactaaaaatacaaaaaatagccgggcatggtggcacacacctgtagtcccagctacttgggaagctgaggcagaagcacttgaacctaggaggcggagg[138 bp omitted]tttttacaataggttaagagtacataaacctgttttctaaggtaagggataatgggattgctaaaatacagggacattctcctcatacacacacaaacacatctacaatctcaaggggctcccctactctgagaagcccacctgtagacaagaccttaaaaacaaggctctgccatgtgccggcctgagccaatactcctaccagaatgtaaactccccaaggagttttatctgttttctctcttttatctgttttgttcacacctgtgtccctagtgcccagaacagtgcctggcacacctagatgtgaatgaatcccagatggtggtaggaataggtgtttcagaatgaagtcacagctcagctgcattagatctggtcagaacaaccaactccccagcaagccttttttgctgttggccagaccctcagctcatccctgtccccagggttactaatacaaacattaagttttctccatcaactgcttactatgtaacagggactaagctgaatgctttaaattccttaactcactgaatctacacaacataatgctgctgatgaggaactgaggaggaaacagacacatgcccagtaagagctaggattcaaaggcactacctagctctgaaggcatctgcttcctaattccatttctcccctccctataagctcctgtcccttccttctgcctggtccgtgtgcccaaagctgttccccccaacacctcccagcggtctcctggggcctgaagccaggaagagcccttgtggccataggttctgagccagtctcttctggaggcatttctgcaatctgtggctgcttcaggcaggactcctgccaggtcctgcctccctgagtaccaacaggagggcacacgagcctgaaggagatgaacagcaaaactccacggatcagacaagccagctcctcatgctccttattcagcaaatttgtagtaaatatttactgtgtgccaggcactgtgtgaggtgctggggaccttgccctcctagggcttacattcgaatgggggagaaagatcataaggaaagctacagtatcctattaaggagaggtaaatgcaatgaaggaaaacacagaagtgagggagagtaacaggggatgctatgttagatggtcagggaaggcctgaagttgactcgaatggcacgagggcgagagtctgaggagatctgcgggaagggtatttcccactgagggaggcggagtgcagaggtcctgggctgcaggaagaacagccatgaggccctgtggctttaataaagggagtgagggcaggtgcggtggctcacgcctataattccggcactttaggtggccgaggcaggtggatcacctgaggtcaggagttcaaaaccagcctagccaacatggtgaaacccatctctactaaagatgcaaaaattagctgggcatggtggtgggtgcctgtaatcccagctactcgggaggctgaggcag[136 bp omitted]aggcagtgagagaagtcagcaaggtgaccagagagcaaaggactttgtaagccatgcacgggcagactttggatttattctggtagatatgtaaagtcagtggagggctgtgtgtgcgcgcagtgctttgagggggaggttagatgggagtgatttgctccaacttacattttaaaaggatccctctggctgctgtcccttgagtcagtggctcaagtctctgggcctttgtctcctgcctcattcctcctccccaccctccaacccctcagctcctcacctgtagagactgaggtctgtgaaccagtcctggacaacaatcaccacatggcagaccgtgaaaaggaaggcagcaatctggagtgactgagggtgggcaggatggaagggaggtgaggacctcttctgcccagactaatcaggagtccctgatcccaggactcagttcaggaggcagcaaggcaaggagccttcaagcagctactgtgtgcccagcactgtgatggcacttcccttacaggccatccctaactcaggaaaggtgggaattatcacccccattttacacaggcagatgctgaggcgtcaaaggggagggggtgggaaatgacttgcctgaggggcagagccaggagttgagccagtcctgactctcagtgttgtcctcttcctatagcccttggggcagccagggctcttctgaagcagaaactaagtggaccacccacacccagctctccagatcttgggaggatgggggtggggatgtaaaacctcagtcctgggcctggcttggctccctcacctgcatttcaacgtaagtgtggggaaggttgtactctggaggcagtttgcggtcattattgatgagatggtctaggatagaagggctcaggatgggctgcagcaaggaagagaacagagtgtcactcagatacccaagtttcacacgctcaaggcaaatacattgtctatctcaggacaaaacaaggtcagaaacaaaggcaggcaatttctaattagaacagcaaaaggaagttaaagaaaaaaaactcaaagctgatacacttttccagctcctttacaaatcactgttgctcgcaagcacctcatgcccaaagagaagaaactgctttgtgctaatgaatttttaacgtttactcaaatgagtcatgtcccttaaaggctcattttgttgtcagttgtttcatacgctttcaaaactttgctaagataattacttaggtaaaaaaaaaaaataattagtgtgaaaactggtgagaattttaaaaactgcatcagtatgtataagaatcagtggtgagctcaccggacttttttttcttaaaggaacattcaatcaaaaaactttaagagctaaattaaattagcttgatagtctactggcttcttactgcagtgaaattcttttagaaaggggctttcacaactgctcgcgttctcaaactccaaacattgagcagtgctctattctgtcttgtttaacttccgtcctcctcttcacaggtctctgacccagaccacagccggtttggtttgtctccaggtctccatggcccctgcacagggcctggcacacaaggctcacatcacatttgtagattttccactctgtgtcatcaatgccacagtgaccagaactctgttccaccaactatgagtgccaactaaagggccaggccctgtgccccagctctcacccccagagccagggctctgctctgaagagcttcgggcaggcagggagtgggaacagacacggtggcaaatcacatgctatggtgggaggtgcatatgggcaacagtggaaggggagggcttctgagaggaggccacaccccagtggagtcttgaggaagaagaaggcgttagccaggcaaaaacgcaaggcgagagcctattgtactgataatggtattaattgctaagggtatttagcacctaactcctgttgggtgctgtcattaggactttacttgcatcgatgcactgaaacctcacaaaacccctatgaggcaggcagtattgtttttcccacttaaaactgaggaatgaaaataaataacttgacaaggtcacacaattcgttggtggtttcaggtaaaaacgggatatgcgaagtccagagaagagagagatcagtgtgtgtgtgctgggggtctggtggctcctccagaggcgaggataggcagtctgagggaggcaagccacaccctccgaatgccagcttaaggaatctggactttgcctgagaggaagggagaagccgaggaaaactgccaggtaaacgcaggaccagtcagtgctaacgacagtgacgagcctgagcactaaccttgtgccaggtcctggccaagcactttgcctggattgttccactgaatccttgaaactcctaagaggctaagtacagttaccatccctatttacagataaagagctgtggtttaagggagtttaaaactgaaagtcacccagctggtaagaactaacagacaggatcagaacacacattctccagggcccacacttttcagcactatactagaaatcctttaggctactgtgtagaaggcgaatgagatgggggcaaaagtgacaagagactaagggccaagaaaagacacaatttgccccagggcagccagtatgtccatggcttgactggaagcacatggaatccacgcagggttctggcttaatcacattccaggaagaggctcaatgcaggatgtggcagggtggggcaaaggcaggcggggctggcacctgtgtgtccaggaaaacaatccgttcttgggtaataaagaagtcgatgccactggtctggttgccccctcgttccttcatttcagcgctctgggcccggaaaacataagtcctgtggagaggagcaggcaggggtgtgtgagagctctggttctcagccttggatgcatccgaagtgtgaccctgtgagctgagcatgtgagccgtggtgccctgcctgctccctaagcttttcatctgtggcccatgtcagggggtgggaggcgggggtagtgcatgttttgaagcacacaatttcactcctatccataaagagatccattagttcaattaatgaagccagtacactgaggtgttgaagggcagagactccgccagtctgccaggattcagatcccagctctgcctcttcctggctgtgtggctttaggcacactccttaacctttttccatcagtttcctcatctataaaacggggataaccacatgatcaaaactctgtgtattactgtgaggtcggtatgtgtaaagcccttagaatggtgcctgatatataatgatatatacttttagctgttaattatcaaataaacctactagatcccaggcattggagagagagcactgagtgccctccactcccacagtgagagagagtttgggtcttgttcccagcatcttcccctgtcaggtgagtctccctcacttctacgtgtgctgggtgctgggaatatgagggcaaagcaggcagagcagggccgtgccctaaaccactaagttcaacttggtgactctgtgacttgggcaaagtgattttaccttttgaaatctgtaaaatcagggtaatagtacctacctctcaaggggtaatttctatctcccctcaagatgcataatctgttgtctgacacaaagcaggcatccttccactttacaaacactatacggaaaacctcctatttgccagataccaggatatagcagtgaacaaaaaagactaagtcggcttctgtgaagcttctggtctagtttacaaattaccagaaatcagtaactgtgggtgttagaaagaagaggcgtgcagtgctccaagtgcagattgcttagttggtggagccagaaagggctgccctggagagggaaatgacaatgctgagggtgagagagaaagagggagttaattggcactgggtgggggatggacgcagaggaaggttgcatcggcagaaagtaggtggcttgttgtactaggactcaaagaccagcatggcaagagcagaaagatggtgcatgtgggaggggagggagcaagaagaggatacacagacccttgtggagcatggtaaggctttggcctatgagcctggagaagctgctggagagatgtaagtagaggagtgacaggatcagactgtggtttgaaaggtccccttgctgctatgtggtgaggaccgtacggtggaaaaagtggagataggcttacaaggcccagtgccagagtgcctcgctctgcctctctggccttatctcctaccactccccttctaaggctgccacgttcttctacacacactatgggcaagctcccacttcagacgcattgcccatgccagtccctttcactggaatgctcctcccagcatgctttttctcaaacgttccccttagcaaggccttccctcaccatcctatttaaaactataacctagtctgggcaacacagcaagacctcatctctacaaaaaataaaaaaaaatattaagggcatggtcgctcatgcctgtaatcccagagctttgggaggccaaggtgggaggatcacttgaggtcaggagttcaagaccagcttggccaacatggtgaaaccctgtctctattaaaaatacaaaaattagccggatgtggtggtgcacgcctgtaatcccagctactcgggaggctgaggcaggagaattgcctaaacctaggagatagaggttgcagtaagccaagatggagccactgcactccaccctgggtgacaaagcgacaattgtctcaaaaataaaaaataaataaattagccaggcatggtggtacacaaatgtagtcctagctactcagaaggctggggtcaaaggatcacgtgagcccagtctgggcaacacagtgagatcctgtctctacaaaaaattaaaaaattagttgggcatggtggtgcatacctgtggttcccagctactcatatggccaaggtgggaggatggcttgggcccaggtcaaggctgcagtgaagccatgatcaggccactacactccagcctgggtgacagagcaagaccctcgtctcttaaaaaatagtaataatttttaaaacctgtaacctaggcccaacattacctccctataacccttttccattgtgttatattctaacgtgccgaatagtgtgtttattttgtttactatcttccctattaaaatataagtcccacaagggcagattttttccagttttgtataccactgtatccccagcacctagaacagtgcctggcgcatagtaagcaattaatacagtacttgtcaaaactgaattaaatcaggcagaccagacagaaacctcttggtatcctgcatgtaagataataatggcttggactaaggaggtgggagtgaaggagggaagaaacagatgaattagaaagagaattagcaggaaggccaggcacggtggctcacacctgtaatcccgacactttgggaggccgaggtgggcagatcacctgtcaggagttcaagaccagcctggtaaacatggcgaaaccccatccctactaaaaatataaaaataagctgggcatggtagtcccagctactcgggaggctgaggcacaagaatcggttgaacccaggagatggagattgtgttaagctgaaattgtgccaccgccctccagcctgggtgacagagcgagactgtctcaaaaaaaaaaagagagagagagaattaggaggcaaaacctagacctgatgaaaagagttgatactgaagtctaccacaccacaggctgacgtggctcaaaaagacaagctgggtgacaggattctccctacctcaggaatctgaactgagacccatggggaaaatttgctagttggggtgaaaagctgaaatggaaagaatgttatctaagacctggaactattccaaaatggaaccaaactgagtcatgagtgagcagagaagaggagggagagaggcagaggaacctcacagctccagctttatgggatgtgtattcgcccaacagtggtcttcaccttttctagatctccatcagcccactctgagatctggtgcaaactagggaccttttccctagaagaaaagcctgactgcaaatgtgtgtaaaattctgcatacggccaacggtggtggctcacacctgtaatcccagcactttgagaggccaaagcgggaggattgcttgagcccaagagtttgagaccagcctgggcaacagaggaagacgccatctctaccaaaaaagttaaaaaccagctggtgtggtggcatgcccctgtagtcccagctacttgggaggctgaagtgggaagatcacttgagcctgggaggtagaggatgcagtgggctatgatcgtgccattgcacttgagcctgggtgaaagaacaggacactgtctcaaaaataaatgaataaataaaattctgcatatactgttaagggattaatggactcctgacgctcatccatggaggccagggtagtatcacctgctttacaaaaaaacagatccctgtatttttaggtaacttcaacatgtctctgttcttcaccaccccagtggctactatccattctcattccccattttgattctcccttaatgagatgtgtatctcccccattcccaaattcctacatttttccctttccttctctgcccccagtttcgggacctgtttctcaagttctcccctccccaaaacctgctcctgtgcccttatgctttatcttcataatcacattccatccttactcaagaatgttgttcaggccagagaatcctcatgtctgatcctccccagcctggagaagcagagccattttcccaaggtgacacagtaggactgaggctggtacagaaaccactctctgtctccagatctctttccccactctatttctcagatcgtatcagctaccattctgtgatacttgctctatgccaggtgctcattaacttttgccttcttgatcttattttattctccaaaaatctacctggacaggggatacgggaaatgaagtgacctgcccaaggtcaaccagttatgttgcagggctgagcctgaggtgggcccaaatccaaaaccttaacaactacatcatcccacttcttgtctaggacctgtaccatttcctgaggccaggcaggaagggagggagggagggaggaacaggattggatgccttggagctacacagatttagtccagcccattatcatcttcatctcatgaagacactgaggtctacagaagaaaagcaactttccaaagtcctttggtaacaccacttgaaacacccaagcccaccttgcccctgctcccagtgggtgcccacctccctcctgcaccctatctgatagcccctcacctctggtcctcctctggagtgttggctgacaacaatgacatgaccatggacttgcctgtcccctggaggcccaggacaccaaccaccaacacatcagtctgatccaacaggtactgtgggaaaatacataaatgactctgacaagtctgtcagctgctggagctggaatgagggggggactccagagacccttgtggctcccccacctgccttatcatatatgaagagaaactcctatagtcccaaccccttcaactaggcatagggcctctgttccgtgtcatggtaggattatgtgaaatgttttagacacaaacaacagtgtctgtgagaactctgaagtagaaaagagcctagcatggtcaagaagctaaaaggaagtcagtgtggctgaacacagcgggaaaaagggaagtctgatcttggagaagtgaaagtgagagtcacaggaacagaagggcaggttggagaagataggactcggcgactgagggctactggcacagattcctggcaaacctgggaaagcacatgaaagggagtggtgtgcaaacaggagccacccaggctttcgtctgtgtgtgtgtttttttgtttttttttacattcatatgctgttgtctgtgggatttaagagcccctctggaaattaactgagaccaactctgggccaccagctctgctgactttcaccaccagggggtgtaagagacactcctcaaggaaaacagctacgttctgaactgtggctgctgctccttagaattaccttaaaattttgttttgttttgttttttaaaagcgaatcctataggccaggtgttgtggcccacgcctgtaatcccagcactttaggaggccaaggtgggaggatcgcttgaggccaggagttcaagaccagcctggccaacatggtgaaactccgtctctaccaaaaatacaaaacccggctgggtgcagtggctcacacctttaatcccagcactttgggaggccgaggcaggcggatcacctgaggtcgggagttacagaccagcctgaccaacatggagaaaccccatctctactaaaaatacaaaattagttgggtgtggtggtacatgcctgtaatcccagctactcggaaggctgaggcaggagaattgcttgaacccgggaggcgggggttgcggtgagccgagatcgtgccattgcactccagcctgggcaacaggagcgaaattccatcacaaaaaaacaaaaaaaaaaacaactatctgcgcgtgatgtcgcacacttgtggtcccagctacctgggaagctgaggctggagaactgcttgaacccgggaggtggaggttgcagtgagccgagatggtgccactgcactccagcctaggcaacagagcgagaccgtctcctaaataaataaagcaaatcctgggcccaatcaggatttaacgtgctttaacacattaaagcagaatatctatggatgccctgttcaatcagtaggcattgatcatacatggctatttaaattagtaagcttaaacaacattaaaaattctgtttggttgtactagccacatttcaagtgctctaaagccacatctggggatagcggctaccatactggacggatagttcaaatatatatgatcttcatcactgcagaaagttttccttaatagcgctgaagggtagggtttggttttttgttgttgttctgttttttgtttttttaaagctccccagttaattccaatgtgagagtggacacagaagtggcaggggcaaggcaataaatggacttgaggctgtgctaataagtccaggctgctgggtaggagaggtgacacctctgggacaatctgagcaggggtgtgacaggtctaggggagaaaaagcagaagaagggacacaacatctgggagactggtgttatgtatgatgatctaggaatgtgaggtctgaactagagcagggggtggtgggatggatgggggtcactttgggggagtgacattcaaaacagttgacactgagacagcgtgggcttcttgttctttttttttttttttttactgagacagggtctcactctgttgttgaggttggagtgcaatgtcatgatcacagctctctgcagccttgacctcctggagtcaagtgatcctcttacctcagcctcctgagtggcctggatgcctcctgccaccatgcctggctaatttttaaatttttggtagaaatggagtattcctatgttgcccaggctggtcttgaactcctgggcttaggtgattctcctaccttggcctcccaaagtgctgggattacaggcatgagccaccagcaagggtttcaaccaaataagaagggtactggagcagggtccaaaagactcccctgctgtggatggcacgggagatcccaggggtcctggggtggtagtgagagtacttctttaccaatcggtaccaaaggagttctgtattttaccaactagcaagcacagccgagctagttgaaattccgctctggttaggtgagaatgttctgataccaccccctctcactgctgtaagttgcctcaaaaccctccagtctggtgttgcctacagagaggtggaagatcagaggatgcaggatgtgcggaagctcaggcagggcaggacccctcggtacctcgatggcactgtcacaccaattcatctggtcatccaccaacttgatgctgtgcttcatgcgctctgggggcagtagtttggcctgacccacgacagctggagattggagaaagcaggagacagaggatgcagtgaggatctgtgaggagacgccagttcccaacctggtactgcccagccccaactcacggtccatggctgctggtgcggcagtgcccatgccccggttctggatctggtacacaggctgtgtgggtctctgcccctccttctcccccttgggtggcgcaggggctgcagggggtggtggggcggtgccctcaggggtagaggcacctgtcacggccacaggccccttcccctcctcccgtggcttcatgagaacgatgggcttctccagaggggctggagcaggcggggcagcaggggctgttggaggtggtggctgttttgactacggaggtaaaaaaaatcccatcaatgggggcaatcccttccctaacggctccccctcctccctccttctctgctcacccgctctgctggaggttttgagaggatgatgggggttttctgcatgacggaagtgcttgtctcttcgctggcatcctgtggtgagggagggcagttactcatgaatggctctcctggacattccagatctttatgtaccatgaactattctaaatgccgaaatatattaactaccttgatcctaccaacagccctgtgagatagatactattattacccccactttacagatgaagaaaatgaagcctagaaaggttaagcagattgcccaaagtcacaaagcccaggcagcctggctgcagaaccaaatcctcaagcattctgctcagctgcctctgcgaggcaacaagcccaggaggaaaggaactaggagctagacaggtctgggtgcaaacctgatcccgcctcgtgttggctgtgtgaacttgaataaggaaccaccctcgccaccttcacttatgcctcattttcccatctgtgagtgggtatgggaattccttcctcacagactatgatgaggatgaaaggagagagaactcatcaagtgtctagcatggcacctgacacatggcaggtgctcactatgtgagagctgctggtggcacttgctatcctgatcacctctgcctcagccccctcctgctctggcaaagctggcaggctgatcccaagccttgacctcttcatgcctccccaacttaccctcagtctgctgaagaggggagaaatctgagtctgagtcccgttctttctctggttccttgagtaacctcatgagagtcttgacccctaactgtgtctgttccttcaccaatatactgaggacacttacttaaaccctgctcacttcactggcttacggtgaagaacaaacaaaaagacgaagtgaaagtgcttcgaaaagaagtttcaagggaaaaactacaggaggagaggctgtggacttccaggaggctaggaagggggagatgatacaggctgagtatctcttatctcagatgcctgggaccagaagtgttctgaatttgggatttttttgaactttggaatatttgcatatttactggttgagcaccccaaatccatttgcaaggctccaataaacatttcccttaaatgtcacgttggtgctcaaaacatttggaattttggagcacttcggatattcagtctatacctgggatgaacgctgtgagggtagagagaagacacacagatataaccaggcggcagaatgtaaagcactggtgcctgactagcacagaggaagcaggggagaggcgagagaggcattcaggataaggcccaatgggctgtcactgatatgggagaaaaaaatgggaagaggaaaaatggcagaaagatgccgaggtcagcacgggacacagaggataagaagcccatgggtgtgacaagaggctgccagggctcagtagcacatttagagacaaagatgaggtttaggaggtgcttgttcaaggattaaacctgaaggtgtggcgggataacattccccaggagggcattatgtggaaggaagagagactacgtgttctcatttacactgtggcccaagagaaggagcaagtaagagcccagctcactgtgaaaaaactattcttcatgtttgtacagttttatagctcagaagctggccccagttgtcacctacttccaccctacctgacatctctgaggtggacagggccctagagaaaaaagcccagggggcaggttctggcagtgagtcacctaggtacaggaggggagcgaggctgggcctgggcacaagccgatccctcctgattcccagcccagggcgctctctacagcaggcagagcgatgctatatgtgagactaagctggacctggatctgagtcctggacccaaagtttattgactctgattttggaaaagtcccttcacctctggggctcattttcctcattagtgaaaatcagatctatcatagaatctacctcatggggtagctgtaagggttcaggaagacccaaaggatgtaaaagactttgcacagtgcaagcacagtataggctgctcagtaaaaagagtaacagttgttgttattatgacatgaccctttaaaacatgagctatggcacctctcagctcaaactctccaatgccaatttcactcagtgaaatacaaagttctttccaaggcctaccaggtcctacatgatttggccccagttacttgacttcatctcctatctctctccctccttcctcatcaattgcagccatcctggcctcctatggctactccttgaacacgccagatatgggccacctcagggcctctgcgcttgctgttctttctgtctggaatgctcttcatctcagatgctggcatggcttattctctcatctccttcaagtctctgctaaaaagtcacctcttcagagagaccttctctgaccatgttatctagaacagtctcctttatcactctccaccttctttatccatgagggtggtaggttttgtttacaaatatatccccggcatctggattagtgcctggcacatggcaggtgcgtggaaccaaatagatacatgaatgctgctcctgggtccagacactcacccttctctctctttcccatggtgcaatgtagtccctctcccgaccaccaggcccagagagattctgggggccaccagagccaggctccttccaccgtcgccgccgctctatcccatagagtccaggctgactgtgtccagactcagacatggttacctatggagggaatgaggggatttcaggatgacagagtctcttcctactctacttggcatatcctagactatacgaagtcccttctttcttttttttggagatggagtctctctgtcgcccaggctggagtacagtggcctgatcttggctcactgcaacctctgcctcctgagttcaagcaattcttctgcctcagcctcccaagtagctgggattacaggcacccaccaccatgcctggctaatttttatatttttagtagagatggggtttcaccatgttggccaggctggtctcgaactcctgacctcaggtgatgcacctaccttggcctcccaaagtgctgggattacagatgtgagccactgtgcccaaccaaggctcttcctttcttcttttttttgagacagagtttcgctcttgtcaccgaggctggagtgcaatggcgtaatctcggctcactgcagcctccacctcacagattcaagcaattctcctgcctcagtctcctgagaagctgggattacagatgcccaccaccacacccgactaattttttttgtatttttagtagagatggggtttcaccatgttggccaggctggtctcaaactcctgacctcaggcaatccacctgcctcagcctcccaaagggctgggattataggcgtgagccaccatgcccggccaaggcccttcctttcaacagagctctgggcctgtggtagcaactgcaagctggttcccaacatccactcctgacttcttccaaaaaagtaaaaccctcagttctgagctaggtacatggctatccagaacaaacttctcatccttgtttgcagttaggtgtggccatgtgagtaagtactttctggctatggtatgacactagaagtgtggcttggcagcttccagaaacttcccttcacagactctggcacatgccttctgccccttcctcccagtgacaggaatgtgggtgtggaggttggagctcaagcagctatcctgggctgtaaggcaatttaatggaaggtacaataaaacaagacacaaggttggggggttccacgttaaccttgaattgcctacttcgagaggcagtgaaaaacaaatacacatctatctcttacttgcagccaaaactattcccaactattaaaatgctccaacataaataaactcacaggggcaagttcacataaaaataggatattctccttaccaaaatgcagcaaggcatttgcttacaaaccagcaatgtgatcctcagtccaacagctactcttgattagtcattactagtgtatgtcatggtggggctccagccacttactagtgtatgtcatggtgaggttccaacactcaagggcctattttcacctggtatcccactacatttcagtgtctgtctgtcttccgttcctgacggtctgccttccctcacagtgaatttcatttcaaggtgtctccagtgtttattctatttgagatgttatataatgtctggctacctatgcaacccactctccaccatttcagtatctgtttacaggtccttagagagttttcccagctgttcacacatcagtctagggtggtatttgactacttaactgtttgtagaactcagtggggctatctgctcaagctcagaagtcaggttgacaaagtgtggcctaggggccaaatctggtctgctttctgtttttgtaaatagaaagttttatcggaacatggccacatccatcaatttagaaactgtctgtggctgccttcttgatgcaatggcagagctgagacagacaatacagtctgcagggcctaaaataattattctctggccttaacagaaagttttactgaatggccgagtatggtggctcacacctgtaatcccgacactttgggaggccgagacaggaggactgcttcagcccaggagttcgagaccagcttgggcaacatagcaagatcctgtctctatataacatttaaaaaagaaaaaagtagctgggcgtggtgacatgcacctgtagtcccagctacttgggaggctgaggtggtgggatcacttgagcctgggaggtcaaggctgccatgatcatgctgcaccactgcactctagcctgggtaacaaagcaagaccctgtctaaaaaaaaaaaaaagcagaaccctgtctcaaaaaaacagtttgctgacccttgcttagcttggaagtatctgttaaatccctccatgaatcctcccctgccccacctcataatgacataaacaggtccctccgagactctccagaatggaagggtctgtttacaagatgcagtcataattttgctagccagacaagtggcttgtctagctcctctcctactgtgctacatgacctctcccagagccacaagccaggctgaagactgctttcctagacagaggaggacaagggcctgtttacagctgcttagggaaaatgactcattccataccgaaatgactgcttagtctgggatggagattctccccagaatctgagactcctccctcacttgcaattaagtgtctttacacattattctgaaatctacccagtgcttaagtacttgtcttcatgcctcaattgggatactgcccagccctgaggtttctgtttactggcctatgaggatgccctttcctgtgcaaagtaagcgcccctgtgtgaatgcttttcttttttttttttttttttttttgagacggtcttgctctgttgcccaggctggagtgcagtggcacgatctcagctggctgcggcctctgcctcccgggttcaggcaattctcctgcctcagcctcccaagtaggtgggattacaggtgcataccaccaggccgggctaagttttgcattttcagtagagacggggtttcgccatgttggccaggctggtatcgaactcctggcctcaagtgattcgccagcctcggtctcccaaagtgatcggattccccgggtaagccaccgcacctggcctccctgtgccctttattctgggagcttccacagtatctgaatgtggggagttccttggaac[138 bp omitted]tccaatgctgtttccgggctcctttggggattacccccaaacttaggaaagctggtctatttaagtgtctgctgatggacttctagggtgacttcccgaaaattaacaaatcgaatttacatatttttggggagtgtctcctcagtatttaggcatcgcttcacacactcccttcggggatctcccagaacctcactatttgcaaatatttggggagactctcccgattcctgagtatgtaagcccacttcgtggggcactccccagcccagaactgtagtcgatttgcacattttcctaaggactccctaggatttaaacttctctctacggggttctagaagggagcctcccccggatttaggcattgctttacaaagcttccctcggggaacccaactcaagtttctcgttacacgttattggggcggcctccccagtacttgacgggcagtttgcaggctgtacttggatctcgcagagcataagtttctcatttacacgttatttccgtcccccgcccccattcctgccaacccagtatcgaattgacggtcgccggccccctactcagtgccgcacccccgccggacgtcccagcgacctttcaatggccaaggcgggggcggggcctgccggagcgccccgcccgccgccggtgcgctagcctcgcgcgggctcgcggcccccttacctaacgcggctgctgattggttctcggggcgcggtgtgcgctctcccgtgacgggagtcgggtgggggcggggaggctgacccaagccacccgcctgcaaatggcgtctgggggccaggaacgtgggaaggagagaaaatgggcactccccactccgaaaccggcctcggcgtccgggttgcagcccctaaggaaagctgggccgaaggaagaagaggaggaggatgtaacgcgggcccgagctgagatcagttccctcaggcgactcgtcctgcgcatgcgctgagggctggagctcgagaactgaatgcgctcgccgggctgagcgtgcgtggatggaggcggtcggcttcagcacgcatgcgggttccggagcgggaggcgggaggacgccgcggctctgactcaatgcgcgtgcgcgcggttggggggttgagggtggggagatgagtagggaaatggatacgccgaggagccggcaggagggagagcggcccggatctggggttcgagttgtgcctcttcggtgatgttggcgggatgcagtggggtgggacgacagggaggaatttcactgttctgggctgagtgccaagaacacatgaatgaatcagacttggcgtgcgccctggaagacaccccggcctgtggagagactgccagggcctcaaatcacttaggaaagggcgcgggtccggttggaccttgaaggacaggcaggcgagggtactccagggaacagctaagcaaaggcggcgaagaccccgggggaagaggtctagactggcttggattcagggtccacctgggtgggaggtgaggcagcagaatgggcaggtcagaccctgaagggtctccagtgtcagttttatccttaaggcctgggagatgcagaatagtctgagacagaactatgtttaaaaccctcgaaggccgcgttggagaagggaatccgctccagggtcgaaaatttaaacacacgtgggcggagtcttgcgcgcgccaaagaggaacattgggcgacgggcgcggcctggagagcgcatgcgcattcggaagggtcggcagttccccagtgggcagagtgggtggatgggaaggttctagctttttatttgaaattttatttatttttattttatttatttatttagagacggagtctcgccctgtcacccaggctggcgtgcagtggcgagatctcggatcactgccgtctccacctcctgaaattcaagcgattctcctgcctcagcctcccaaatagctgggattacaggcgtccaccacgcctggctaattttttgtatttttagtagagactgggttttgccatgttggccaggctggtctcgaactcctgacctcaagtgatccgcccgcctcggcctcctaaagtgctaggatgacaggcgtgagccaccgtggctggtctaaaaaaaagttttttaaaattatatttgaacaggtattacatgtacatacacaattcaaacctctctggctgtatacaataaaagtaagtttccacctctggttcccattttcctttcctaaagcactggttcccggtttccttctggagctgctgttataataaagcattggagttaagagcatgtgttgagttcatataaatagcggctgagcttgaccaagtgacttaatactctctacttctacgtccctgtttgtgaattgggtgtggtataaccttacttacaacattgccgccagcattaaatgggtgagagtgcatagaacagtgcctgttgcctaatggtactgtgtgttgtctctgtgtattattttgtggtctaccatgctgatagttgtagattctgagcagccctctcccctccaggcctcatccctactgtcattgtcccagtaccagtaccaggtggagccacctctccaggctgccacaggtagaaacaccagtcacccagaatgacttgagtccactgttgatggattctggggaaagattctgggtgtttgataaagatacacatgacaggccatctctgtattatgtctatcagtgtccaattttacttcttcagctcaggccatatctgaatttctcaaccccagatcactcacgattgccagtttcacgtcagggcaaccctcagaggtagaattttcttaaaagagggaaagaggaggcctggcattgaccttggacccactgtgtaccaggctgtgtgctctctgctttatatacatcactataatcttctcccctaatttgtttaacagatgttggtccgcgcagtgactcacgcttgtaatctcagcactttgggaggccgaggcaggcagatcacctgaggtcaggagttcaagaccagcctggccaacatagcgaaaccccatctctactaaaagtacaaaaattagccgggtgtggtggcatgcgcctgtaatgccagctgctcgggaggccgaggcacgagaatcacttgaacccaggaggtggaggttgc[134 bp omitted]cccataggcaggaagcagcagggcctggattcaaacccgggcctggattcaaacccaagcctgtctcactccagagcaagcctacactttttccctggcaccggggagccagcctggtgatgagtcagcagtacagtcaggcacccagtgagctgccttttgtattagtggcatggtatgctgttctggagatatatcatactttaacactttctctgttgatgagcatttagactgttgctgaacttctgctcttacaaacatttactgcaggggtttgtgtgtatgtttctgttttctaattttttctttttcagacatgttcttgctgtctcgcccaggctggagtcatgtaatacagttgtggctcactgcagcctcaacctcctgggcttaagcaatcctcccacctcagcctgaggagtagctgggaccacaggcatgtgctaccacacccagctaattttctattttttgtagagacggggtttcactatgttgcccaggctgtctcaaactcctggctcaagcagtcctcctgcctcagcctcccaaagtgctgagattatgctacagttaatatcctggtacacgtggctgcatgtatatgttagtattgtcagtagactatctcatttgaagtgcaagtagaattgctgggtcaaagggtatgcacattgggaattttgagagccattgccaaatgatctgttcatgtctttattttttgtttttgagacagggtctccctctgtcacccaggctggagtacagtggcatgatcatagctcactgcagcctcagcttcccaggttcaagcaattctcctgtctcagcctcccgagtagctgagactacaggcatgtgccaccacacccggctaatttttgtatttcttgtagagacagagtttcaccatgttgccgaggctggcctcaatcaatccttccacctcagcttcccaaagtgctgggactacaggtgtgagccactgcgcctggccctgttcatctctttttcactttttgttcatttctttcatttatatgttgaatgaattatggaactctagtcatctgccaggcacagctgtaggctggagatcctgtaatgaataggaaaagcacctgccctttgggagcagatattctagtggggcagatgacatcagataaaggatgcttggaagaaaagaaaatcgggggtgaggattgggaagacattgcaaaggatacaaaatttcatttagacaggaggaataaattcaagagatccagtccacaacatggtaactatagttagtaacaatgtatacttgaaaattgctaagaggataaattttcagtgtcctcaccacaaaaatgataaatatgtgaaataatgcatatgttaattagcttgatttagccattgtacaatgtataaatatacaaaacatgttgtacaccataaat[221 bp omitted]gaggcaggagaatgacatgaacctgggag[136 bp omitted]gccagggaaggccgctttgaggggatgacatttgatcagaggcctgaatgcagttaaggaaggtcaggaaatgagccatctaaagatgctgaagaacggccagtaaaagaccccaaagtgggagtgggcctggctgtccaaggatggtcaaggtggccagagtggctgaaacagagcaagggagggaaagaagggcaggattatttagagacggagctgtagacagggccagtttacataaagtcttacaggccatggtaagcatttggaatttacttccaaatgtaacaaagccattgcagggctacaaacaagcaccggcttgttccaattaatgtttacaaagacttctccagtgaacaacaaaaattaacagtgattgcctatagggatgagggttatagacagatgtgggtcagggctatgggaacttaaaaagcgttgttgtttttttaaaccacgtaattattagctatgcgcaaaaatgttcagtgaaaacagtgctggttgctgtgaggagaatggcctgcaggggcggaagcaggagatgagaaagctggtgtccttgcctgggcaagaaaggatagtggttctggaagagggtggtgctaatagatgagttgagaagggtcaggaactgggatcttttttgaaggtagcgccaagaaattaaacatggggtgtgagaggaagcatgaatcaggggtgacttgaaagtcatcctagagatctgttgtacaacagggtgactctcattcataacaatgtgttatatgcttgaaacttactaaaataatagattttaagttttctcacaccacaaaaaaataagtatgtgaaataatgcatatgttaattagcttgatttagccattccacaatgtgtacatatattaaaacatcatgttatttgcagcattaaaaaaagttctagcggggaggggggagggatagcattaggagatatacctaatgctaaatgacgagttaatgggtgcagcacaccagcatggcacatgtatacatatgtaacaaacctgcacattgtgcacatgtaccctaaaacttaaagtataataataattaaaaaaaaaaagttcgagaggttttggtcctggccaactgcctgaagactgagacttttttttttttttttttttttttttttttgagatggagtcttgctctgtcgcccaggctggagtacagtggcgtgatctcggctcactgcaagctccgcttcctgggttcatgccattctcctgcctcagcctcccgagtagctgggactacaggtgcccaccacc[147 bp omitted]agactgaggctttttaccgggatgaggaaaagtacttttgatgggaaatcaacaagctttgaaattcttaactttgagatgcacgttggtcatcaaataagtggttggagttaggggaaaaagccggggtttgtagataaagactttctgactttgcgtcacagaatttagtttaattaattaatttattttgagacaaagtcttgcactgtcacccaggctggaatgcaatggcacgatcttggctccctgcaacctccacctcccgagctcaagcaatcctcctgcctcagcctcccaagtagctgggaccacatatgctctagcacacccggctaattttttagagatgagggttcactatgctgcctaggctggtctcgaacccctgggttcaagcaatccaccccatcagcctcccaaaggctgggattacagtcactacagagttttaaaaatacacacaaagatgttatggtatgaagagactcccacgtacccatcgcccaatattgacagacatctgcatttttcttgtcttatgtcttctatttttccctcccacatataagcatacttcccgccaccccctggagttttgtttgttttaagaaaatcacagataacctgtcattttgttaataactatacaagtatgctaaattttggagctgcctatttatagatgatatttaaagctatgatttgctgagatcatctaggctgagaggttgaagagagcagggactaggcctgagcatcccgcatgtagaagccaggatcctggagaggggctgagatggagccaggagtgtcaggagaggggatgacctggcgccatgggatcaaagggttccaaagagaagataatggactaaggagcagagacacggggcagcagctggaggcagatgtggggtccaccatggaaaagacatgacttttgatcccccatctaactgtgttatggaaccttctcagtatctatcaggaaaaatgtataagtacttatttttctttatttttatttattttctttttgggtgacatataacttaagtgtggtaaagtatataaagggcacagatcttaagtgtaccaggtaatgaattttcacaaatttatgcatccatgtaaccgctaatcagagaacatttccagcacccagacgtcttccttgtgctctttccctgtcaattcccctgctccagaagcaaccacccatctaatgcctttcaaaaacaggcacagagattcgttgtgtctgtttttgaacttcatgcgaatgaaatcttacagcatgtcttccgtgtgtctggcatctttagctctttatgtctggcaaagtcttttatgtcattctatgtagcaggagtttagaaccaactttatggccgggcttggtggctcacatctgtaatcccagcactttgggaggcggaggcagaggcaggcagaacacgtgaggctaggagttcgagaccagcctggccaacataatgaaaccccatctctactaaaaatacaaaaaattagctgggcgtggtggaggtgcatacctgtaatcccagctacactcgggaggccgaggcacgagaattgcttgaagctgagaggcagaggttgcagtgagccgagatcacgccactgcactccagcctaggtgacagagcgacagatattttgcagtttggtgaatagtgaactttaaggaaaatggagaatctaaaatgcttctgaaagttccagtgggatgtttataagatgggagaaattatagcatgtttgtgtgcagatgggaatgatagagggaaaagagaccaggagactttggagctgttttttgaggaggtgtggacagggtgagggggctagacttgacttgaagaagggccagctcatcctggaaaaagaaaggaaagttttatcatttgacaccccctccaaattataaaaagcactctcctggtttgtatatgttagcagctattccacacaacataaaagcttaaagcatgcctttggactgccagtctggtgttgatgatgatgatacagcttcctttatggaccataataaatagctgggctgggcatggtggctcctgcctgtaatcccagcactttgggaggccaaggtgggaggatctcttgagcccaggagtttgagaccagcctgggcaacatagtgagacccccgtctctacaacaaagaactgaataaatgttagtgatgtttatttttattctgagtggatggggcaagaaggaggggagagcagcaggcagtttgggaaggaagaggagcctagtggcctgagcagccaggacagggaggagaaggggaggccagaagacggggagagactgagcttgcagagtcccccgggtgaggcttgtgggcatactgacacaatggaatactactgtgtaatgaaaaggatgagcagcatggctgaatctcaccaccaccctgcagagcccaagacacagatacacaccagggcgtgcagcagggttccttccaaagttcaaagttgaacaaaaggaatcaagacaggtcaggatggtggttcctgggatgaagggggctgttggctgggagggaaatgagagctttagggggctagacacttctagcttgatctgagtgatggctactcaggtgaatgtatttgaagaaatatattgagattacatttaaaatttgtgtactttattgtatgttaaaatatatgtcagttaaagaaaaaaagggggcaggcatggtggcacacagctgtagtcccagctgcttgggaggctgaggcaggaggatcacttgagtgcaggaattcgaggctgcagtgagctacgattgtaccactgtactccagcctgggtgacagagcaagactctgtctctaaaaaaaaaagagctggactcagagctagactttgacaggagggcagtgggaggaatgggaagtgtgtgggtgttagaaaggtcctcaagggcagttgggggatttatgaaggggaaaggcccgtgactggctgtatgaccctgggaagcccctgccctctctggaccgcctttcccccacccagtcctcatgagagtgcaggcagaacagaaataggagaaggaaggagccaaaatcaccatgagactcagctcctggaggacagagccctctgattcatgtctgcagcccagctcctggctcagggccttcaggaagtgttgatttggtgaggggggtgcaaaacctgccagaagtgggggcatccaggcttgagccccacagtggagaatgagggcaggcgggccagggcagatccaagataattcagaacacaggatctcttgtatgttctcctaggttcttagtcaaaagccccttttcactggttctgaccttgcctcagctgaaatcaacatgggatggctcagctgaaaccaacatggggtggcttcaggccatcccaggcattcagagggttcgtttaatgacattcactgaggccctgtctatgtcaggcccttggtgttgaagacgcaatcatgaacaaaaatgaaaatacaatgtgatggtctcctgagtgtctgaatgcgccaggtggctaagtgctggggctctggggtcaggctgcctgggtcacatcctggctccaaactgctttgctatggcttcgggcagttacctcatctgtaaaatgggaccaacattgcctaccttgcctccttttgtgaggtcacttattaaaagggcttagcgtggtgcttgacccattattattattattattattattattattattattattattattattattactactactactactacttgagacagggtctcactttgtcacccaggctggagtgcagtggcacgaccacagctcactgcagcctcgacttcccagcctcttcaagtgttcctcccaccttaccctcccaagtagctgggaccacaggtgtgtgcccccacacctggctaatttgttgtcgttgtcgttgttgttgttgtttgagatggagtcttgctctgtcacccaggctggagtgcagtggcacgatctcggctcacggcaaactccgcctcctgggttcaagtgatctcctgcctcagactcccgagtagctgggattacaggcacacaccaccacgcctggctaatttttgtattttcagtatagacagggtttcaccattttggccaggctggtctcgaactcctggcctcaggtgatctgcctgcctcggcctcccaaagtgctggaattacaggcgtgagccaccatgcctggccagacccaatattattatcgtgatagggataggtttatgaggctataggagtatcagacagggcctcctggaggaggggacatattagccgaggcctacaggaggcgtaggaaggagtgtttgccagctaaaagggagtggaggcaaggaaagagaggtcccagaagaatgagtttggcaggggctttggcaacactgccaggagagcttcttgcaggggaagggtgtcagcaatatctggaggtctcatccagttcctttcttgagtccccgcctttactccccaggtgggctggcctccagaggaagggcagttcgtggcagtgggtggcggaggctccaatttagctctcagggatgaaggggcgaggctggctgtggactttaagggaaatccaaagatagctcaacagaaaaggatgactcgcagcctgatcttcccctcaagaggagggaagcaagaatgaatcagcctctcaagctggaatgaagttgcggcgggaagtcagtcctcggtttgtggcccaaggccactctgcctctgactcaccttgcagtggggcgggatgggtgtgaatctgggctctccagcccgtattcctagcttccggctgggggcctgaggggaggcctggctcctcttgaaacctcggtttctacatctgtgcagtggggtaacgagggtcaggagagtggttatggtgacttataaacagagctgggcacacagtagggcctctggaagtgccagcccccctcctttgcccccttccctttcacatcctctcttgagcggatgtgaaacgggtatgtgggtggtttggggaggtttggggcctctgttagtctcttgatgagtgagttgtcatctagattctggtaaggcatgaatagagggagaaaagcaacaaaaaatcagaaaaagggcagccacgcattgtgtgtgaaaatcaaaaacaataataaaaatgattcttggccagggacagtggctcacgcttgtaatcccagcactttgggaggctgaggcgggcagattgcttgagcccaggagttcaagaccagcatctgcaacatagtgaaaccccatctctactaaaaatacaaaaattagccaggcgtggtggcaggtgcctgtaatcccagctacttggggactaaggcaggagaatcgcttgaactctggaggcggaggttgcagtgagccgaaatcgcgccactgtactccagcctgggtgacagagcaagactccatctcaaaaaaaaaaaaaaaagattctctctcacatatttggttcctactaaatgcctctgggctactccatgttttaatcttcacagcagttccatggggaggcagtcccatttcacaggtgaggtaaactgttcagaggtgaagccacttacccaagatcacaccaccagtggatggtagaaccaggatttggaccctgatctgtctgagttcaaagctgttgctctttgcctcagatctgggcaggggactgttgctgaggactgcccagcctacagagttgggagggcacttacaggagaaggcctctgagacaggttcagacaaggcaacagtcttccactggacggtctgccagttaggagtgtagatatgtttagagagaaatggcaacttctggctttaacatttattacaaagataagagcagaggctggtgagttacacttcttcctccccaccaggtgctctctgcagctctggaaaaatggtgtcctctttgttgtcccaccagggggcgccacctccagccccgccccagcctcatacccagttcttcagctcggccagcggtaactgaagcctcccagaatcctggatccgggcccctagtaccctctttcccagggacccaggagtcctgcctccagtcgcctgcacttgtaactgagagctggaggtcgtccatagcagcatagtgagagtgtttttgatgagggtatgcagagtgggggtgaccatgttcccacctggggcctcaggtgggccaaggcctacccactttagccagcgtcccctccagcagccatcagcaagccaacccactccaagccagggccccctttggtccttgcacttgaggtgctttgttcagggctgggtcaggagtggcagagacgatgtccaccacctcagtactggggaaagtagcctggttcctcctcgtgggtcctggagagacagagagactgatggagaggcaggccaggaagagggagagtgagagtgggacacaccgaggtgcagacagaaaccggtgggcagaagtgggagacagggggcaggtgtttccgggccccgaggccagggggcaggagggcatttagacagagacattggatggacagccagacaatgtgcccaggacaggcagagagagagagagagaccaagcaaagagggagaaggccatcaagggtcagtgaaggggagagggtacaccatcttccttcactgccagtccagccccgaactgagtcctttcctccagacagtgccagagctgatgagaaaaggcggccttgtctcccagccatcccccgcccccttagccacatagggtgctggccacaggaacccttcctccaggatgccttcctgcccaagtcccagccccctcaccagctacttggactgctggctgggttctggaagctgcctcggccccagggcagtgctaagcagctcagtcagggcatccagcttccccgccagcgtgtcaatctgtttctccagggcccggtgtgagctgctcagattctgctgcaggtcatacaggatcatgtgcatctgggtgggaggagaggatcagaggtgtcggggctggggtcgacccccacctactccatagcgtaaggcaatggaaccaatattgaccacatccttatggtcctctgaggattaccctcgacaataactgttaccatgtattgaccacctaccacttcccagctacctgcccaggtgtttccctatatggtttaaaatcctcccaaaagccacagggagtgggaatcctgttcctgtcttacagctgaggaaacaggcatggaacagttaaatgacatgcccaaagcagctcctgaaataagacctagaacatagcaggtgctcattagatatttctagcatggatgatgcctgacttccaaatccacatagtcttttactgcattctctggctaggattcactagttgatccctgagggtttgtggattttctatggaaattcttgaattctgtgtttttggcttgataaccttcagaaattaccacctgccaattcctgcagatctgggccactgcctcgtcactgagacctgccatgcggttttggggcctgcatctgtgaccgtgcttaccatggcattgctgccaggggccactgtttgaactgtcgtgggctaacgagaaaaagcaaaggccaccagataagcagaagatgctgtgagccaggccaagggggtgttgtgacatcattgtccctaagcactggcgaaatcaaatggtctcagcagaagaagggggcgggtagctgagtcacgccttggccaggcaaacttgcatggacgtccctgttgccctgagtacccctccacaagagcagcagagattgagttttacggaaacaatgtcacctgtgtccttgtcagtgttgttcattttaattgtattggttttgccgtctatgggcttggtttgtaaatttgctttggttttattgtatgagctgtagttggaaggaattttatatccgtccacatgtaagtaacttaacaataaagataatttgaaaccaaacactggggttctttgtgcaattttttttttttcagtttgtaagggatctgtgcctttcatgaatgtaagaagctctgtgttgcatcattcattccttccttccttcattcaaccacagacctttactgacaggctgtgtgtgccaggcccctgccaaggttccctgttctagggccagatttccctccctgtggccccaacctcccccttcttcaagacctcctcccacgggatcctagtaccttggagatgtccaccatggagttcacttgttcccggagcttccggtgtttcagccgcacctggcggaacctgtgggaagaagtggggagtcagttttacaagcctggtccctgaatgtagctgtagctcaggggaggaatgaagggaggagaggcacatgaagaaacaaaacaaagaaacaaagttgtcgaagagctgaaagagtgggaggggatgcaccctgcctccccacgagcccccatccccagtagaaacccaggtacccaggtccgcagacacaccgagatatgcggagacaaaccagcacagacacatagagtcatgcacggtcagatccaggtgagacctggatgttgagtgagaccacacctgggtgtcctgacctggacaggcatggacatgcacacacacagccgtgcagagaggtgacttggacatgggtgcacatggacacgtgtgcatacaaagcggccctcacgcgttgatggcggccagcagcttgcgctgatgcctgcgggcagcatgagactccttcctgcgagtatgtttgtagaacatccaggcttcttgtagcactcgggcagcggactccttcatctgggggtgggtggcacagtgtccgtggagatagacccttacggttctgggaaggcagggctagggctgggactcttgggtcctaggggaagcaggggcgcctggactcctgcttcttggaagaggggtgtcccatgggtgccatatgcccatctcacctctttggtatactggatatccatcatgaagttgtgcacgtgcttctctgccttgttaaactccagcttccgggccaccacggccaccagcagggctgtgcagcagacaccctgtgggcacagcaggcaccgtggcatgaggctgtgccaccgactccctccttgaacccgcccaacagccacagacggtaggcacgaccatccccagttagcagacaagcaaagaggctcagagaggagagccaaggtcccagctcagagcggtggagctagaatcataaatcgcatacgtccgagcccaaatttgatgcatagcattcacaccctcagggtggcctcttgaatgaaggataggattggaggagtgagaggaaggctgggttctgagccaggggcaggcctctgggtcctcagtgctcatgtggtcagccattgcactgtggagggcgaccatccttctcccactcccacaacttcttcctagctccagccctgtcttctctctcctggaccgtctccagcctcccactcatcctcccctaacccccttggtcccctctaatctcccaggcttccactggcctgaacgtctcagcctggctcccaaggccttccaaggtctatgcctcccacctggacaactcagccctggctccatgctgcctgccctccctgagcaccttcctccgaacactcattctcctcccttccttctcccaatgctcctggcccttcaaggccttggcaattcctagctgcttgtggcatctgctcacctgtccccaagttagaaggaatcttcctaggaagcatccccaaccctatagtttcagctcttgatcactcagaacaacttccagtcacaaacgctggctccaggggactgcctgggttccaagcccagctctgagcaagttatttaatctctcagtatttcagtgtctcatctgtgaaatggcctcacagggttactaggtggatttcatgaattacccctggcaagtgtgtagggcagagactggcacagagtatgtgctccggaaaagtaagcttttatggcccaaccatgccatggagcctttcttccaggagcaggctgtgagctcaagtgcacatcaccctatctctctaggtttctgtttctccttttgtcaaatgagggaggaggtcctgagcggtgctgcaggtccctaactgagtctctgcccctcttcccttgctccaaagactcaccactgggggagtggaggtcaccacatccttcacctgtgcacctagggattgggggatgaatatgtccttcctaggcccacatctgggctaggtgctggtggcttaggtccccgagggtgaggggaacccgatcttgtagggaggtgaaggccaaggcattaggtgctagtctctagagggggccagggctgggtgggaggacctgagtgactgggtctatggagggaaggaggtggatgtcagggttcaggaagaggctgactcaggctgcagagcctctgcctcatccttgagggcaacaggagctggtgtggggtggctggatgcctggccacccctagacctgtttactgagcacctcctgtgggctgggcactgttggaagcactttacgtagttggacccatttaatcatctcagcaagcccatgaggagcatcagcatccccattttatagatgaggaaagtgaggccccgagagatcacgtggctcgcctgagctccccagccaggaagtggcagccgcaggattcggacccaggtagcctggccccacaggtatgcacttgataactggactctacacccttgatggaggctgggagacgatttcccagttctggaagaaaatggggctgcgaagtcaggagcctgggtccctgaggaggataagggctggggccctaggttctagagagagcaaggacttaggggctggattcctaggtctgattttttattttattttttaagagacagggtctcactctgccacccaggctggagtgcagcagtatgatcatagctcactgtaccctcaaactcttgggctcaagtgatcctcccaccttggcctcccaaaatattgggattacaggtgagtatcttgttcttgaagagagaatggggctctgggggccccagacactcaagtttctcaggagctgtccctgagagcctgtgttgaacccatttaatcatggcttcctggggccagaggatgaccagtttgggatagggatcatgtccccaaggcagctgtactcaccatgactccagtgcacaggcagacgatcttgccccacatggtgcccggcaccacgtcaccatagccgatggtcaggaatgtgatggggatcagccaaagtgtgtctgaaaggtgcccagtggcattaacagcctgcctatggggaagggtaggttagttctaaaaccccaccatagaggtttccatgatattcactccccttccctctataccctcccatccccttccctctggttccctcccttcccctcccagtatacacccatagtcctaagaatcacctggacaaaaagccattaagttctgagctttggaaagcctgcatggcctcctctctgctgtgtgacctgggcaagttgcttagccactctgggatttgagactgggtctggccaatcccaatgccggtatggtctcagctaggctacccgggctgctgtagcattcagagcgtgtggttgagggtggagagtcgatagggggccaaaacccagtcagaccctgactggtggctacatccacccagaggaaggggtatatttttctaatttccacaaagatgctgtgtggtccagaagtggccctatcaggaccaaaaaggactctaaaaaggcttggtgggactcggccttcctttcctctcacttcacagaggagacatttaagtccagccatggaaggggttgaaacattgagatttgtctaactttgtccacaggccccttgccgcaagaccagcagggaaagcttcattcatgagggcccctgacaccccagacccaccgggttggagtttctaggagcgaagatggaatctgtactgttcacaaaccccaccccctcattccgaagtacattctagtttcaggacttctgccttggaatgtggaactttgacttcctccccattctcccatcattcaattgagaaacatggtggggggatcattcattaatcctgattctgaccaatttcccaattgtgaaaactaagatcctggaaggtgaaggagtttaaactcatgacagagggcgggcatggtaatcccagcactttgggaggcttaggcaggaggatcacttgaaatcaagagttcaaaaccagcctgggcaacacggtaacgtggtctctactaaaaatacaaaaactagtcaggcatggtggtgcacatccgtaatcccagccactagggaggctgaggcatgagaattgcttgaagccgggaggcagaggttgcagggagcagagattgtgccactgcacgctagcctggataattgagactccagatcaaaaaacaagaactgccagggagactacagatggtggaacgtgacatgcatttttcagatgaggaaactgaggctcagagaggagagatctaaagccagatcttctcattctcctcctgccctgaaggatctttgccacatacactagaccagaggttctcaaccttggttgggccatagaatcacctggaaggcttgctaaagtggattgctggccctaccctccaggattcagtaggtctggaagggacctgagagttttcatttgcaagttcccaggtgatgctgctggtcttgaaatcacactttgaggaccactggctgagatcactcccaacctcgtttttctctgaaagggatagaaattgaggcgcggcatcgggttacacagtatctagctggcaaccaggatctagttccaattccctgcttggaattattttccagagcagttccaaatcatccccttcctaggatcacaaaaagcacctacctacagtgcattccgtgctaattgggaaaatatgtctccttcctccaaggcagaggcaaccctttaggcaggtcccagagataggttcggagaccgaacagatggcctgtaaacctgaggcagaggtcaggcagccggaagggaggggctttctagggtctgtgtgtgcgtttggggagactgaaggctgcaggtggaggattggctgggggcttgtctgttggttcctctcaccccagttgatgggagtgtgggcaaatttcagccagcaagaggagaaggggtcaaagtgtgaactttctccactgcttggtcctagggggcctcaacctgcaccgcggcacaggacggccgccgtggctgtccggggttcccccctgcgcatttatgcctccatcaccctcacctctcggccacggacagcacccaggcggtggtcagccagaggccaagcgtgaggccgagcagcaggcggccagggtgcgtgttcatgtaaagcttggccacgaaccagtggcggaagcggacttgattgagagcgccgatgctgcggtaggaagcgttgagcaggacgccgctgcgcaggagcacggcgcggggcaccaggtagagacgcagcagcatggccagggacagcagcgcttccccttggcccaggaatcccggccagggctgcggggaggtcagcggcgcccctaaatcctgcacgcacggcgggccccgcacgggcgccgggtgcagcccacacaccaccagctccagcacgatctgcgccgcctgccgcccggtcagcgccacgcgccagtcccgcagcccgttgtcggtcatgaacagctgccggtagggggccaagaagggaggggtcaggagcaggtcaggcgcaggtcaggcggcggcccgcgcctgcctgcgccctgagataagtggggtgtgccgcctggccaggagggagggagtgcagggcgggagagggatagggagggagcgggacaggacttgaggaagacatctttccactttttcctccttccccaccacccaccccactagtttcagcccacttccagcctttgaacactgactgagcgccgactgtgtgcctgacattgttctatgtgctaaggatacacagtgaacccaacagacccccctgcctccctagagcttgcattccacatgcctggagctcgctcctactcccctttcggttgacacgcgtaataactgtaataataatatcagcaataacaaagccatgggccgggcgcgatggcttacgcctgtaatcccagcactttgggaggctgcggtgggtggatcacttgaggtcaagagtttgagacaagcctggccaacatggtgaaactccatctctactgaaaaatacaaaaataagccgggcatggtggcgcacacctatagtcccagcttctggggagtctgaggtaggagaatcacttgaacccaggaggcagaggttgcagtgagctgaggtcatgccactgcactctagcctgggtgacagagcgagactccatctcaaaataaacaaaacaataacaataacaaaatcagcatgtactgggcaccgtggatacgccaggtactgctctatcccgtttacatattgtgacttagtaaatgcccacaacccagtgagattgatattattattgcccccattttatagatgtggaagctgaggcccaggtcccttccatgggcaatggcgcactgggctacaggctacttagctactctatgataagatgataatgtgcactgtttactgagcacctcttatgtgccaggcactgctcatagaattgccacacatggccaataatccccattttacatgcaaagttatgataggagagggggaagaggggaaagggaatggagcaacaggatctggggcaatgggacaataggggatgggatgtgtctgggtgagacccaaggtggggtatggatggggagagctcctgggtctggggcaagagggaggttattggcacagagatagggtgattaggagtgggcacccctgggaccggaccaggtgcagtggctcaagcccgtaatcctagcactttgggaggacaaggtgggcagactgcttgagctcagtagttggagaccagcctggacaacatagtgaaaccccgtttctactaaaatacaaaaaaattagctgggcgtggtggcatctgcctgtagtcacagctacttgggaggctgaggcatgagaattgtttgaacccaggaggtggaggttgcagt[131 bp omitted]ggatgccatgtcggagcacagagatctgggaagctgagtgcctgggagcagagtggacagaggcctgggggcggaagcagggctgcaagggcactctcagcatccgtgagtgtgcaagggggggctggggactacaggggaaggcggagctggtgggggaggctctgcctgtctgctcatggttcatcccatctgggtaggtgagggtgtggacgcagcacctagggcagaagaacttcattactcagatcaggaggaggaggagggtggaaagtgtgagctgacagggcgctgagggggttggagggagcaaggcttaggggcggggcctgccctacctggacctctttggcatgaaaggccacgatgaggcagaggagtaagaaggtggaaatgctgatcgtgcatttaaccaggaacaggtagagcgcccactgtcaggggggacggaaaaagcggtgtgagatcccaggtctccctccgcctggccctccacctttccttcaaaaccaccattttttttttttgattcccaattttcctagcctccttcccctgcaaatcagtccctcttgatgtgtcggttctggagaagtctcaaaaccatcatctgggcccagtgcggtggctcacacctgtaatcccaacactctgggaggctgaggcaggtggatcaccgaaggtcgggagtttgagaccccctggccaacatggtgaaacccagtctctactaaaaaaacaaaaaattagctgggtgtgtaatcccagctacttgggaggctgaggaaccagaatcttgaacccaggaggtggaagttgcagtgagctgagagatcgcgccactgcactccagcctgggcaacagagcgagtctccgtctcgaaacaagcaagcaagcaaacaaacaaacaaaaaaacaccatcatctggtccccaggaatgctctctttctccccaacaggacaaccctgtccagatgctggtgtctaccctcttcctcagctcttctcccaagacccatacccatgaagggggaccttgaaactcacattccttcttattcctgtcccatttcacatcaaaaatagttcttcaggtgtgtgtgtgtgtgtgtgtgtgtgtgggtgtgtgtgtgtggtgtctagaaaaagacatctagcctctagagagtgccccctccccttcccttcctacccacctggtgttgtcctagaaaccaacttcaatcaaccccaaccccagatctggaagaatgtagaaactaccattcaatcctcaaagactgagtcacacccttctctgctctcatccggagggctgagtccctgagacccagcctcagctctgagacagccccctcggttctgcccccctgcagctccccactgccacccctctcttctggctctaagcccagggcagatctggccggaagcacagggcctccagaaaccacggagaaattgttcctttttttttttttcctctctttgtgtggcacaaccttggaggaatctagaattctggagagagggatttagaggggactgggactgttggatttcctaagaggggttggtccctgcctggcgggtatttgcagggggaggggaccacctgggcgtccttacaaagcattgcacctgtttctcctaagagggctgccagctcccctggctgggccagcatcccgcctctgagcaggggaagagggccagtttcctgccccaggggcctgctccccaaccccctatcagaacaatagtgctgttgtcaccagccctcccccaccttctatggctccctggttccctgcctctttcttcagtctgtcttaactgcccacaccactagacaacaagctccctcctcacactgcaatttgcttctctggtggtcctctctacttttccatttcctcttcccccaaatcccggacctgtctgcacttgggcctgtactctgttctctgaatttccctgtctctagggatggttgttgctgtctttctatgtgttttgagggtctttgtttctattgtctctttttttttttgagacggagtcttgctctgtcacccaggctggagtgcagtggcacgatcttggctcattgcaagctccgcctcctgggttcacaccattctcctgcctcagcctcctgagtagctgggactacaggcacacgccgccatgcctggctaattttttgtgtttttagtagagatggggttt[144 bp omitted]tggatttctcagtagcttgatagccctatttgtctttctctttagctgtacttctctatctttctgcatttttgtctccatctctctttttctctccatgtatctctgtgtctctgtctctctctgtacctctccccatccctcctcctccaccccacctggtgcttttggatatctctatccagttcccttggactccctagggttttgcacctgcctctctgccagcccctccccctggggagcaggtgtctgggtcctttgcagaaatgagctcattagattgagatggaggtggtgaggggcggtggatgttattaagagagtcctcaaaaggggactgaggagctgtggctcaggcctgtaatcccagcactttgaggcaggaggattgcctgagtccaggagttcaagaccagcctaggcaacaaagcaaggtcccatctctacataaaataaaaagggtggagggtgacccttagggtcatgtattttaaccctcaccccaatttacagatggggaaactgaggttcagagggttgtaacagcttccccaaggtcccactgatagaggcagtggcctggccatggtggagggaaggaagaaatgaggggtgagaaagcagaggggtgaagtggggtaggatggaccccgtctcttcccatctgccagggtcactgtgttcccacctcggcttctgggtgcggtgcttcggcgtgggagcggcgggcaggccccggccatgcttcctgttggcatggacttcggcggccccaccccctcagtgcccgccgcctgccagaggaagctgcatgcctgaccctccatgtggctcctggtcacttcagagctgcccaccaccccctccagatccaagtcggaacatcagaccctcaggaatctacccaatcttcatatcagtgtccgcatctggccctaccagcccagttccacaacccttctgccagagaggtctccagcccctcctttcctgttgagcaagtctgttctcccctcaagccacttattccaacccttgtccttgatctgccccatcactggcctgaccagggctggaatgtgacgggagcctgctgagacctgccctgaccccactttcccctttcttccctactcaccactcatcttcggagtcagcccctcttccccaaaagcaatcaaaacccccttctccttaagactcaggaatccaggacccagccccctcctctcctggtacctaggagtccaggccactgtaagcctacctctccactatttccctgactaatcagcatgcagatttggggagaaattgagcttgttaacagtggagactgggttggggttggtggggggaggcaggtcgggggagaggtttgtttcccatttcccatccccacccccaaggcagttttttctgtcctttgcatctaaggcactgggtaaacattagaggttagacaaggaccaaagagctgccgcctactggaagaactttgtctttcctccactctcccttcaccaaacctggggctacctctccccttattggctcttggggggcttgagtgtctgatcagccaccctctggcctccaggggtcctggacctctggccgtctaatggcaacatcttcaaagactgaaacactgaaacaaatattcccttccttttgcagagaaggaccccagcaactgtctcctgggagcacccaggagtcccagccaaagcccctcctccctcagacccaagagtctaggcccccaacctctcctccctcagatccaggagtcctgacccccagcccctcctccctcagacccaggagtccagaccccagcccctcctccctcagacccaggagtcctgacccccagcccctcctccctcagacccaggagtccaggccctcagtccctcctccctcagacccaggagtccaagtccccagtccctcctccctcagacccaggagtcctgaccctcagcccctcctccctcagacccaggagtcctgacccccagccccccctccctcagacccaagagtcctgacccccagcccctcctccctcagacctaggagtcccagctcccagccaccatgccccactcaccgagcaccccccgaaccacagcatctctgcatgcagcaccatgagtccaatgccagttcctgccagcaccagtgcccagccggccagagacttctcctgctccagcaagcgctttcggcgtctcaaggcccccaggccaagcaccagatccccgcccatggcccccggggtcttggggctcagccagcttcctgcccagggtcccccacctcgcagcacgcacagggcagccactgtggcttgcaggtcgtcagcctgctctgctggctctgggacttttgctctgaggcacagcagagccctgtgccctctggggagtggtgacggccaggcagggcggggaggggcaggggaggccccagggtagggggaggctccccagctcccccttttgagaataaggaggggctagggtgtgtcttggggcagagcaagaaagagacgtccatccacgtggataaagacacacacagacacacgatgggctttgtcacacacaatggtctgtactttgtgacacacacctctactcaccacacccagacaccgaaggacactccacagcccaagacggagactaacacaccagggcacacaacacaacctacacagagtgactcacaactcccagcaagctctgaaacccacagccacacccagacaccacacacatggtgtgacacacaccagcacttagcaagcaggcagtatcccgtggcacacacagccacccaaacaccgtccacacacaggcacaaatattacactcaaagttgtcacaactttctctgacacaaagagccacacccaaacaccacaaataggacgatgcacaactgtggccacacaaacacaacatacaccaggtgttacacaaacacacaatatatattaaagtagtgacgccctgatgccacacaccacacaccgacacaaacactgtgcagtcccagtttcctaaacactacacacccttggaacgaaacccaatacgtgtagacacacaacatttagggacatacctatagtagcccccaatcacccagagctagagaattgcacatacattgtggcgcctgttgactcgaacacaagtgctcgcagtgatgattcaaaacacgcactgattcagcatgctctgatgtgtggtgcgattcaaatgtatggtcagaggacaagctgagtggatgcatgcagagacctacaaggtacagcgacacacggagaaacccaagaagcacatgcctgaagcaagatgattctggtatattctggccacacaggacaacatccaggatgatgccctgggggaaggggatggggttggaccttcatagaccccagtgcccaaatgcaacatacggctgggtgcagtggctcatgcctgtaatcccagcagtttgggaggttgaggtgggaggattgctggagcccaggggtttgagaccagcctgggcaacatagcaagatcctatctctaaaacaagcaaaaacaaaaaaacaaacgcaacatacaccatcacctctgagccatgagccacacccaaacatgacatacaatacctccacacaacccaacacgttatattccaacatgcgtggccacacaacaacatacgcggagtaatacaccagcacacagtaacgcaaaacacataaacacaatgttttccaacacacccaaccttccacaaacgaccacatgtcccataaaacaccagatgtcaccactcactgatactactgacactgaggtctaccgccacccacacaacaccagcatcgggggaggggggtgtatcctctgacacaacataacacacagctacacaaacacaagacacttggggtggttggcactcagggtgggtgctgggggctgagaaggaagaggcccccaacagggacatggaccctgacgtgagatacagcaaatgccagtgtggaatgtgcacggtgactctcagagcaacacacaacataggacatctccatgtgtcgcagcacgagccactcatggatctgtacaccatacgctccgacacagatcaaaccctcctgtggagacacacaggcatgcactgacctggtgacgcacatcacctcccagcatcatgcactgaactggtgacactgcccttggcctcatgcacacccctctgcaaggaacctgcggacacaaccctccccctccttgtgtcctaggtcgtgtgggaccctggacccaccagccccagggaagcgagacacgcacagacatgtctgactgcacaccaaggcagcccacacaaacacacccagagacaccaaaccatacacatggacacgcccagtggcaaaaacacaacccttgcgggggctccgcccctcggcacacacaattacccactcggcgagacttggcgggagagggctggagacacacccgggcgcgcccagacaccacacatgcgtccacttggggaaagtgcagccgccgggcactcctgagcctgcagcctgggcacccctgcccactggccgcccggctcgctgcgtctctctcctccctctccggctctttctctggttctttgggacttgcttcctgtctcagtctctcctgatctggaaacctccgcgtttgtcttttttttttttttttttttttttgagatagagtcttgctctgtctcccatggctggagtgcagtggcacgatctcggctcactgcaacctccacctcccaggttcaagcaattctcctacctcaacctcccgagtagctgatattacaggtgtgcaccaccacacccagctaattttcgtatttttagtagagacgaggtttcaccatgttggccaggctggtcgtgaacttctgacctcaggtgatccacccgcctcggcctcccaaagttctgggattacaggcgtaagccaccgtgcctggccaggtttgtctttatctctgtctctgttcttctctcctggtacctttgtctctctctgtctctcttcactctgtctctctgtctctgcctctcttagcctctctgtgtctctctcatcgctctgtccctttctccatcttcgtgtccctctctgctcctctgtttccttctttccccgtcactgtctctctgtcatgtctctctctgtgttcatcattgcctgtgtctctgtcatcgtgtctcactctgtctccatctctccgtctctagggccctctgtttttgtctgtctcttgctgaatcggtgtttctctccgtctctgtttcactctctccctgcctcctggtctcctcttgggtctctctctctctctccgggcctctctatgcttgtctctgcctcagtttctctctgctgttcactggcacatctacggacagcctggttccttccggttctaccccagtcccactcaggggttgagggccagtgatccagagactgtggccacccaagggtcagaagccactaaatagcgctccagctgcggccatgccatggcatctgtgccccagttcaggcacttgtgaaaaacggagacagagactgacacagagggagagagagataatcagagagacctcgaggcattcagccagggatggtgggggcatgtattaaaaaaaatcaaagagacccacaggtgcagagaaaccggaaaacacaatcaagacacggaagttagagcacagagaaattttgtctccaaataggccatgactgaaagagaaaaacagcaaaggatgggcatggacatgcctgggtggcagtgatggggttacagtgggaagggcacctgccttcaaactgcagtcctgggatgcaggggtcagtcctaggaaactgcttcactcctcagccagctgcctccagcccagggaggggccaaggggggagggcgaggtgactcagggcctcagggcttcttgtgactcacccttggtctcaatcctagaatggggagtggagggagagaggggtttgtgtaaaagagagggagagggaatagtagaggacctcaaaatgcctaagaggaagggtccaggaggaagaagctgggggtctggactcctggttctgagggaggagggggtctgagggaggaggggctggggtctggactcctgggtctgaggaaggaggggatggggtctggactgctggtctgagagaggaggggcagggggtctggactcctggttctgagggaggaggggggctggggtctagactgctggtctgagagaggaggggctggatctggactcctaggtctgagggaggaggggctgaggcctggactcctgggtctgaaggaggaggatctggggtctggactcctgagtctgagggaggagggctggggcctggactgctggtctgagggaggaggtgctggggtctggacccctgggtctgagggaggaggggctgggtctcatacactggaagaactgattccagagtctccaggatttttccttggccttgtcccagctgcaccacctctgtcgcagccccatctccgggcctggaaagaacccaggtgcctcggggcccagcaggaaggggccagggacaaagagttgtttaactgggcaggctggtgaaggagagtgaagagggtgtctcaggcggaaaggtcattcatcgcccaaggcttgtgcagggaaaggcagggctgagccccgaggaagagatcctgaaagtcagaggtcagtggcggcaaatcctccaccgccatctctgggaccttggagcctggaagctccagggcttataaatactgtcacctagtgttcacttaggcaactgcagacactctccctgtccagcctggtttcttgccaacatagagcaaaacacctactgagtgccaggcactgctcaaggagttggcgatatgtaatgaacaaaaatggacaaaattcttgctcttgtggagtttccaggctaaaggagggagacctcgtgattccatcaatctcagtctcttctttgctctcagtcttcatttttctctctgtatatcattgtccttgttttttctttctttctctttttctttctttcttctttctctctctctttcttttttcttttctttctttctttcttctctctctctctttttaattaaaaaacatttttttggtcataaaatcagttcccactatgttgccaggctggtcgcgaactcctggtctcaagccatcctcctgcctcgtcctcctaaggtgctggaattacaagtgtgagccactgcgccttgtcttgcttctctgtttctatctcctggtcttagtctccaagtgcatgcttttctcctttctccttttttcttcatttctgcttttattttcttctttgtatctctgtgttccccgccagttaaaaatgtatgtatattatgttattacacagagacatacacccacactctatatatagtatatgcagatatgtagtatagtatatggcatagtatacagatgtatagtgtatacagatgtatatgatatacagatatctatatctcacaatatggaagtctagagacctcggtttaagcctcgatgtgaccactgactttattcattcattcattcattcattcaagacagagtctcgctctgtcacccaggctggagtgcagtggcacgatcttggctcactgcaacctccacctcctggatgcaagcgattctcctgcctcagactcccaagtagctggtactacaggcatgcaccaccacaccaggctaattttggtatttttagtagagacggggtttcaccatgctagccaggctgatcttgaacttctgacctcagatgatccacctgcctcagcctcccaaagggctgagattagagggatgagacaccacccccggcctaactttatttttgtatggaatatgttatacgtacagcctggtttagagacaaacctgagttcaaacctagttgccatccatagttgtgtgctctgtgaaacttgtaaaagagggattatgtttcctatgtgacagggctgcttgaggcttaggtgagagagaatgtctggagccctaacagcaggcctggtctatgttaaagtcttgtgatacattgtctcccaagttgcctgccagtgactcctcccttccctgcactggcaggtggcttctcccacgaaaaggaacagtatgttccttctccttcagtctatctggctcatgacttgctttgactaatagaatgtggcaaatatgacactgaaccagttccaggtccagatgttaaggaaactagaagcttctgcttttgtacccttagaactagaagaccaccatgctgtaaggaagcccaagctagtcacatggagaggccatgcagggagaatgaagctatcttggctaaagccccagtcctgtcctaacagaatgcaaccatgtgaatgacttcaggagagaccagcagaaatgcccagtcaagcctcaatcatgagattgtttattttaagacactaacttttggagcgggttgttacacaataaaaagtagattattatacccttatgttcatatctgcatgtttgaagttttccataataaaaaatatatatatatgggccaggcatggtggctcacgcctgtaattccagcactttgggaggctgaggcaggcagatcacttaaggccaggagttcaagtccagcctggccagcatggcgaaacctcatctctactaaaaatacaaaaaaaattagccaggcgtggtggtgggcacctgtaatcccagctactcaggaggctgaggcatgagaatcacttgaacctgggaggcagaagttgcaatgagccaagatcgtgccattgcactccagcctgggtgacagagtgagacttcaactaaaaaaaaaaaagtatatgcatatgtatgtatatgtgaatagataataaaataataaaatgtataatgcaaattgcactccatacactgcagctagcatcattttgctcctaatttttttgcctatgagcctttcttggtcagtctcagcttgggtctcaattttcttgtctgtctttctctattgctttctttctgtgtgtctattcctatcttggcgaaactcctcccatcactttcctttgcatttactttgctttatcacattggccttgttgctgattctcaaacataccaagcttttttctgcctctgggtcttagcattttctgttccctcttcctgaatgcttgcacctccactctcttcatggggcattccctcacttcattcagttctctgctcaaatatatatatgaattattatatatattataatagtatacaatatataatatcatataacatataataaaaataatacatatatcaataatatataaatatataatcatataatatataaatatattatatattatatttatatattatatataatttatatataatatctaataaataattataatttatataatatatataaatttatattatcataaacatttgtttatatttatattattataaatatttatatttataatattataaatatttatatttataatattataaatatttatatttataatattataaatatttatatttataatattataaatatttctttatatttctattattataaatacttatttatatttctattattataaacatataattatattcatattatttacattataaaatatatatttatattataaatatatatcattatatttatatttatatttatgtttatgttatttatatttataaatttatataaatttatattatttatatattcatatatatttatatataatttttgtttcctattttattaaatttttttgagacaaggtcttgctctgtcacccaggctggagtagagtggcacaatcatagctcactgcagcctcaacctcccaggctcaagtgattatcctgcatcagcctcctaagtagctgggactacaggtacaagccaccatgcctagcaaattaaaaaaaaattgctagaaaaggagtcttcctatgtttcccaggctggtcttgaactcctggactgaaataatcctccttcctcagcctcctgaagtactgagattacaggcatgagccacagtatccagccactctgctcaaatataatctctgccttaaccacctcttcaaaaacggtctcttccatctccctcaatcatcctacatcttatttcactgctttatattttatcatagaacttatgactatataaaatgatctcattttatctgtctcattgtttaaggacaggaacctggccatcctgtgttcagaacagtgcctggcacatagcagatgctcaatgaatatttgttgaaggaatgctcttgttcaatgatactgataggcgttttttgactctagcctcttgtcctgttccacactgttcaagatggcatttcttcatttccctgtcttttgtcctccgttagttgagttgctgtctgtggttctgagacccaatactgtggatctgtccttggtgctgacctggacttccacttccgcttaagcttgggagggtgggggaatcttgggaaggggcaaggttgtatgtaaaatccagacattaaataatcattatctgcattaccagaagaagagagatgtctgggttcccaagtgggtgtatgggtcactgtgagttaaataggtattagttctatctattatctaccttttcatatatacatacatattcatatatgtgtacatatatatttattatcgagaacttcaaacatatagaagtgaacagaagagtataataaatctccatgtatctatttaacaaataccaattcgtggtcaattgcatttcatctgtgcttccatttacttcctcacttcctatgttatttcagtgtaaaacctagaggtaataccatttaatcatatgtggcatttaaaattgttttctttttctttttagaggcagggtctcactctgtcacccaggctgagtgcagcggcccaatcatagctcactgcagcctcgacctcctgcccccaagagatcctcctgcatcagccttccaggtagctgggactacaggcgcacaccactgcacctagttacttttaaaatttttagtaaagacagggtctctctatgt[136 bp omitted]gtatggattaattcagttaaacctgtatacagacatgtgtgaccaccatctctatcaagctatctccatcaccacaagaggctctcttgtaaccctcccaactgatacaccagagataaccagtattctgaatccctatcaccaaagattaaaaagctctaatatggatgtccaaagacctgagctctagccatgtctttgcttttgacattaaaaaaaaaataggtctggcgcggtggctcaagcctgtaatcctagcactttgggaggcc[136 bp omitted]ctgaggca[149 bp omitted]agtgcataaaacatagtggtacattttggacaaatgatgtattgtgaacctccataaaatcaaaggcacaccaagagaaagtatttgcattccctagaatctccttatgtgctcctttatgatcgggaacccccaacctccagaggaaaccactaccctcacttagaagggactttaactcctcgtagaccataacactcacactctggtttctcagttcctccttctgcctccagccttttaatcctaaattgcccttgactctggaaaccaggcagcatgagaggccctctcaccatccacctccctggtctccctgcctccaatctcactccctcgggcctgtctcctgcatggccacagggagagcctcatatcacctggctttgaccatgcctcgccccttctctatatcagtccatgtatccccattggctgtaggagaaagttcagaaaatgttatccctatttgacattgtaagcccttcaggggcactgccacatcttcattcacatcttcttcacttaaaaaaaaatagagacagtgtcttactctgttgcccaggctggagtgcaatggagcgatcatagctcactgcaacctcaaatacctgggctcaagcaatcctcccacctcagcctctctagtaggtgagaccacaggcatgcaccatcatgccccactaatatttttagttttttgtagagataaggtctcaccatgttgcccaggttggtttcaaagtcctgggctcaagtgttccttctaccttggcctcccaaagtgcggggattacaggagtgagccactgcttctggctttcctcacactttaaacacaggtaggtactgaaaaatagtttttcaaagtggttgttctattttacacacatactacttggatgtgagaatcccagtagctccacatccttgctaata[131 bp omitted]cctcagcctcccatgtagctgggactacaggcacctgccaccacgcctggctaattttttgtatttttagtagagacaga[145 bp omitted]ttgctacattgcccaggctagtctcgcactcctgggctaaagcaatccttctgcctctgcctccaaaattgctgggattacaggtgtgagccactgtttccagcaggtgaagcttttattaggtgagtgcaaaagtaattgcgatttttgcattgttggaatttgccatttgatattggaatacattcttaaataaatgtggttatgttacacatcttttttttttttttttgagacagagtctcactctgtcacccaggctggagagcagtggcacgatctaggctcactgcaacctccgcctcccaggttcaggcgattctcctgcctcagcctcctgagtagctgggattataggtgtgcaccaccatgcctggctaatttttgtatttttagtagggacagcgtttcaccatgctggccaggcttgtctcaaactcctggcctcaagtgatctgcccaccttgacctcccaaagtgctgggattacagttgtgagccaccatacctggcctgttatacatccttgtaatgggcatttcttgctttatgtttttctgctaatgacttattacttgatgtttattttatgtttattttagactctggaaatgatattagacaaaaagcacattagagcgactttcttatttcttatttgagttcaaaatgggtcataaagcagagtttgttgaatcctgaagcacatatttttatactacaggaatcaacaaacttatttctcattggcaaaaatgtgttgattgtaatggttcctattttgattaataaagatg[138 bp omitted]atggtgaaagctccccctccccctggcccctgtcactattaaaaatacaaaaattacccggatgtggtggcatgcatctgtacagtcccagctactcaggaggctgggacaggagagttgcttgaacccaggaggtggaggttgcagtgagccgagatcgtgccactccagcactctagcctgggcagcagagtgagactctgtctaaaaaataaataaataaaatgaaatttatggtccaaaaccataattacttttgaaaggcatctccctctctgctaagcactcaggaaggcatctgggtcgcaatacccaagcagctacatagccgagtccacagtttcacttggaccccccatactatgagttctaaggcagtcggtgcacccctgttctacttagtgagagctgtcaagtataagcttttagaagtttttgaatcattctcatgacaaagaactgccaattgctcatgtatttcatctcacaggagtccttggccaccatgcctcagggataatcttctatctcagaagtacagtcatacactgcctaacaaccccttggccaacgacggactgcct[135 bp omitted]catggtgaaaccccgtctctactaaaaacacacacaaaaaattagctagacgcggtggctcatgcctgtaatcccagctactcaggaagctgtggcaggaaaattgcttgaacctgggaggcggagtttgcagtgaaccgagatcgtgccaatgcactccagcctgggtgaaagagcaagactctgtataagaaagaagaagaagaagaagaaagattactatgaagctgagcgattccttttttccccattcctcaggctgaaacctatttaccctgttcctcaggctgaaacctaggagtcatctcaagtactcctcaaccaatatatcagcaggtcctgtcttctccactaataaaacctattccttgcagcctgttaaggagaagctaaatttttaaaaaatctattcattttccaactccttgcactacctctgccatcatctcttgcctaggtatatcatctctgcctagactggggcagtagccacctcacaggtctagcttccattcttgccacagggaagcttttaaaatgtaaagcatgtacacaagagcacatgctgtaggattccattcatatgaagtttaaaaataagcaaaattgatctgtgatagaagttggagtcatggttatccttggggtgggaaactgactctgaagggctatgagggaggctctggggacatgggctggaaatattctacatcttgacctaggtggaggttattcaggtatgtacatatggaaaaattgcaatttatgcattttattgtatatattttatacctcaatgaaaatgttatatcatatattacatgtaattatatgtgcatataattatatacacatacaacatatatatacacacatacacacacacacatacacccttatatatgattatggcagccttctacttctccaacgcattcttttttttgtttttttgagacagagtctctgtgtgttgcccaggcttcaatgcaatggcatgatctcagctcactgcaacttttgcctcctgggttcaagtgattctcctgcctcagcctcccaagtagctgggactacaggtgcatgcccggctaatttttgtattttcagtagagacgggatttcaccatgttggccaggctagtcttgaactcctgacctcaggtgatccgcccaacccagcctcacaaagtgctgggattacaggcatgagccaccacgctggctccaacacattctgtgttagtcttggattaaccacagaaacagaaccagtagacaatctataatataagatttattgcaaagaattggcttatgtggcctggctaggcaggtcagaaagagcaagctggaatctcaggcatgggctgaagcagctgtccataggtgcagtttttttcttcctcagagaagcctcatctctgctcctaaggcctttcagctgatagagtcaggcccacccaaactgtctagaacaatctcccttcctcaaagtcaactgattatggactttaatcacatctacgaaataccctcacatcaacacactgattagtgtttgactgaataactggaactgtcacataggtaagctgacacatcaaactggccatcccaacttcagaccacatttgcaataaaatccaaaatctggctgggcatggtgactcacacctgtaatctcagcacattgggagactgaggcaggaggactgcttgagcccaggagtttgagactagcctgggcagcatagtgggggccccatctctatgaaaaatacaaaaattagcagggtgtggtggcacacacctatagtcccagctactagggaggctgaggtgggaggattgcttgagcctgggagattgaggccacggtgagctgattgtgccactgcactccagcctgggatagagcgagaccttgtctctaataaatacacaagcaaaatccaaagttcgctttggattgctagcccatcaaaaaggctagctccttgaaggtgggaatttttgccactttagttccctgctgcatgcccagcaactggaacagtgccttgcacatagtaggtgctcagtaaatgtgaaggatgaatgaagacatccagcttccccttgtatgtcaggatgtaaagacacctgaagcccttgtcacatggccttacaggagcataggagcggagtgtttctgaattgccccccttcccacaagtctacttgctgacatggagcgagaagacacgggagtctactcttgctatgcacttactctgaaaattgctctctcactgtgctttgggcatcttgtctgtaaaacaggaaggtgtcttagtcccttcaggctgctgtaacaaaataccatagactgtatggcttatacacaacagaaatttatgtctcatagctctggagtctgggaagtctgcaatcaatgcaccagcagattcgatggctggtgagaacccactttcttgcttataggcacctgctggctgtgttctcatgtggtggaaggggcaaggcagctctccagggcctcttttataagggcactaatcctattcatgggggctccaccctcatgatctcaccacctcccaaaggccccacctcccagtaatatcactttggtaattaggtttcaaaagatgaattttggggagacacaaacattcagacaatagcaggatgcaacttacttttttgcttctctcactgagttgctggaaagatcaagtggcaaaaagcatgtgaaagaacatggtcaagcatgtgcacagagaacatgctaaaggatcccatctctatgaagttcatgcagttatgaaagtgtcctgcactcatgaaagtgtcctgcactccttgtgctccttcctccctcagacctttgtccaggctgtctcctctacctagaatgcgcttcctcctgcttctttttgccagctactattgatcctttaggattttgctcaagggtgaattcctccaggaagtcttccctgatctttatagcttggagaatttcacctcgctgaactttgccttgtgtgtttttctgtgaagttaatcggcactcatgtgtttaggaggtggggttgcttagcagttcgtggggctgggaatctggtccctgaatccatactcactagatacacaagctcaaccaagtgcttttgcctctcagtttgttgacctgtgacttagggcttatgacaagtagcccatttacactgggccactgctgtgtcccaagtactaaatgttcatctcgttgaatcctcactgcaactactgtgaagtagttcttgtcatgttatagagtttattttcacctccaccttataggtgagaaaatattggcacagagagctcaagtaactcacccacagtctctgcaggctgaatggtggagctgggatttgaacccatgcagcttagctccagagcctggcttaagtaactcacccatggtctctgtaggctgaatgctggagctgggatttgaacccatgcagcttagctccagagcctggcttaagtaactcgctcatggtctctgcaggctgaatggtggagctgggatttgaacccatgcagcttagctccagagcctggcctactaactgttagggcatactgcttattgggcttctcatgatgacactaataaagacatcattgtatagctccctcctagagctgcgacaggctctggagggagagcacaggaagccgtgttatggggtgcctggtgcctggctggtgctcagtgagtaacagctgtgatcagaattgctcttcatcggggcacgacatggctgttttgccctccccggggatgctggtgactgtgtccagtttcttccagtactgttggccaggttgtggggcacaagggcgggagagatggaaggccagagggacaggagtgcaattcttactttaacatcattttccagtgagctatgtgataggggctgaagcagcaagaatgaggtgtgtgagccctgtccccagcatcctggaggggcggtctatgctgagagccccaccagcaggaggactgggaggagcagggccaggacctgtagtgctcggggaggggtggtggctgaagcactggtgaagggctgggtcatggatttcctgttgcagaggtacccctcacagcaggagccctggaggtcgatggctgtccaggggctggtggtgccctcggtggtgcaggagggccggtggcaggttctgatgtacacagggactgagaaattgcctggaggtgggcaaagcagtgaggaacggtcagaactgagggagacagctgcacctgaaccttcaccttggtagctagggccatgcctcggtcctcagacttgcttcaggttttcctcctaagaccagggccaggcctccctcagaccagggccatgcctcttccctcagaacagggtcgtgcctcctccctcagaccagggccatgcctcttccctcagaccaggggccatgcctcctcccccagaccagggttatgcctcctccctcagaccagggcatggcctccttcctcagagcagggccaggcttctccctcagaccagggtcttgcctcctccctcagaccagggtcatgcctcctccctcagaccagggtcatgcctcctccctcagaccagggtcatgcctcctccctcagaccagggccaaatcttctccctcagaccagggccaaatcttctccctcagaccagggtcaaaccttctccctcagaccagggtcatgcctcccacctcagagcagggccatgtctccctgttgggcctgtctggtatcactaccctcatggctgccctgcctccatatcccttgcccaggcccttccacccttccagccccttaccaactgtcattctgccattgccctggaagcaggcggtctggtcctggtgacactggactcgtcgggacctgccgatagcgcagtcatcctggtggaccccgatacaggcgtagcactcggcgccgctgagcgtcggcgggtcgggtgctggcaagagagcgtagatgcacactcaggcagtggtaccctggcacagtcgtgcgggctgcgcactgcgccagagcccgcgcctagcacgtctcgggggttgggatcctagcgcgccaagagcaggcgcccagcggaggccacgccttccccgaggctgccaggcctctcatcgtccctcccggagcccagccccgctctcccgcgcaccttggctcaggttggggagggcgtcatgagtcatgaggtgggcgttgcatttgtcagttgtgcagccgcgcaccaccgagtagtctggcggcagcgcgtccgcgttcgattgcgtctggcccgcaggaggcccggtccagcagcccttccgcaccagggtcaccggcgcgcgataccctgggggcgggatcggggctcgtgctctgcttcccgaaacccttctccctccagtctcagcgttcttcctcctccctctatcctttcactttcacctacacctcctcccctccctccttccctccttcctctcacccccagaccttttcccccgagttcttctcttcctccactcttcctccctgtgcgcctctcccaccttctcttccttgcttccccattgtttcctcccctcaccgctcgtccctcatccactttttcttttgtggggcggaggacggagcctcgctctgtcgccaggctggagtgcagtgacccgatttcggctcactgcaacctccgcttcccggattcaagcgattctcgtgcctcagcctcccgagtagctgggattacaggtgcccgccaccacgcccagctaactttttgtatatttagtagagacggggttttgccatgttggccaggctggtctcaaacttctgacctcgtgattcgccagcctctgcctcccaaagtgctagagttacaggcctgagccactgccccagccctcatccacccttttctttttcttcctcctcttcttcctctccctccccatctttctatctttatcttttcatcttctactcaattcccctccctttctgctcccctctcccccctttttcctccctaatctctcatccctgtcccccggctcccgctccttaccggtgtccagagacaggatagcctcaaagcactcatgaggacaggagatgctgggcagcttcatggccctgaggtcaaaggggccaaagtaggtgtgctcaaagctgtagcactgcagggcttgggaccctggggagagaggcgtggcagagtcagcagggccagtgtgagcctgtcccaggaactcagagctccacccagcaaatgacaggcacacgggcctggcccctctgctcccagggaagacacgccttgagagaccaggtgctgctattgcagctggtcacagctgtgtctgtctcatggcagagtaatgacctctctgcagctgacagtccagttttttccctccaggacactccaggtctccaccctcttccaggaagccctctccctagctatgacttagaataggaaggaaaagtgattcattcttgctctgcccatccttccccaagcttaactcacaaagtggacagcacagtaagagacccctgacaagaaacatgcactccaggacaggtagagtgaagtgtggtcctgtagtgccctgtaaacccatacatcagccccagcaacacacaaactgacataaacacacaataacaacacatacacaggttcatccaagtctcacaaatatacacagaatatcctgaatgcacccaggcagagttttacattctcacacaaaacaagtacgcatctggaccctgcaatataaacctccctaactaaggcacagcacttcacacatggaaaatcacacagacacaaagcgtatgtctgtgaggatgcttgtgcctgtatgataaccatatcaacacagagagggaccagatgcacagaaaatcatacccagagaggtcccaaatcacagaagcacaaataaaaccagaggccacaattatgcgatgtttagagatacaggaaaatgagatcacaaaaacatacagtttaaaatcatatatggaggccaggggtggtggctcatgcctataatcccagcactttgggaggctgaagcaggaggatcacctgaactcgggagttagagaccagtctgggcaacaggtgaaaccccgtttctactaaaaatacaaaaattagctgggcatggtggtgcacgcctgtggtcccagctactcaggagtctgaggcacgagaattgctggagcctgggaagcagaggttgcagtgagctgtgatcgcgccactgcactccagcctgggcggcgacagagggagactctgtctcaaaaaaaaaaaaaaaatcaaaatcacatatggatacaaaatgtatagacccatgtaacacagatacatggagagaaaaaaaaaaaaaaacacatcaaaaggcccaaacaattggtcaggcatggtggtgtccccctgcaggcccaactacttgggaggctgaagcaggagaattgcttgagccaggagtttgaggctgtagtgagccatggttgtgctactacaccttagtgtgggcaacagagtgagaccttatctctattttaaaaacaaccacaagaaaaaaggccagtctcattggctgatgtgagtggattgcttgagctcaggagtttgagaccagcctgggcaacatagtgaaaccccacctctacaaaatcatacaaaaattagccaggcgcagtggcacatgcctatagtcacagttactcaggaggctgaggtgggaggattgcttgggcccaggaggtcaagacttcagtgagctgtgattgtgccactgcactccagcctgggcgacagagcaagaccctgtctcaaaaaacaaaacaaaaaacaaaaactgagcatatatacatagagataaatataggcttacaaatcacagatacataaacacagacacagatacacaaaattacacacgcatctcttttacaaagaaagcaaactcagaaacagacccacaaacgcatttgttcagactaagactttaaaacctatacagagaaacacacacaagcacagagactcataggacatactgaacctggacacatacagaaatcaaactctctcccattaaggagcagaaacacacagatttggttgtgtgcaggaatagcctcctttctacatttctaattccctgtctttgtaaccacttccattctgaaatgagttatgttcctgtcctagcccacaatggggtagaggttgcctgaaggtgaagccagggtttctgccagtttcggaaagagtcctgagggctccctggaaatacctttgaattgggggttgggcaaggaagagaagaaaggctgggatggtgggaagagagacaccaggaaaaatgactgatgggagaagaacaaaggcagggaagagaaatgaaaatgacatagcctccaggctcctgcccaccaagacccaggagtccaggcccccagcctcctcctccctcagacccaggagttcaggcccccagccccctcctccctcagacccaggagatcaggcccccaacccctcctccctcagacccaggagtccaggcccccagtctctcctccctcagatctaggagtccaggccacctgccccttctcactactggattcagaagtttgcgtacctgtcaggcagagcgcagccccaaagaggcagagcagaatgactctggggacccccattgccattgctgagctgggccacctgggacagctcctcccgctgtgatgtgctgcctggctggttctccttactgagtcctaagcatcccggccacccagcctggccagtatttcttcgtcccaccctccctatgtgggcgggtctcttcctaggtaatcgtgatggaaacagggtgatcctcagttgctggagatctacacttctgggtctgagggaggagagaactagaagtctggaacccttaattttgaatgattggtgtcttgttggccttcttccttcacccctcccagcactctgctctaatctgagggtggcacatatggccttttgacttcccttccctccccctaccccaacacacaccacccacacagcttccaatcctgggatgtctccacacccaaagacacgttcatcgtcccatcatctaaaccttctctgaaccccatctccccactcatccacacaccctcagcctccagcaccttcctgtctcccagccctgatcaaactaggctgggctagcgtctgtctcccctaccgggctgtgaactcttcgggggcctccaggaatgtctgagataccgtatgactgaacgaatgaatcaatgaatgaagacacaaacagagaggcaccaagagacatacagggagagacagacacaaaagagaaacagagagagaggaagagagagagagagagtgtgccttcgaggaagcaattacacatgagatgcagaaagacagacacagcctgctgtgaacagatgtgactgtgtagtcacacagacaaacctagaggtgaagagggacaccccgatagacacgacatgcccccaggtgtttcagaaacatttattaaatgaatgaaatcaagaagatggagatacagcagacaaccagagggtcactgtcccccgaggacacaggcagacacatgtggatgctcagacactcagcaggtgaggaggtccagaggaggccccagcaggtggttggtgctgaggcagagaccccaggctagcacctcctggtttgtctcacttcttgctgcctggagatgctgcctgctggatcaggctagtggatactagccacagagtgggcaccagccatgtgcagacacccagagtctcagacccacatctggatggcagagtccacgtaacactggtgaccaaaagagccttaatggtcccctcagatcgactaaactttagacaggtttcttcctctcggccctggatcacgctttttgtaggacacttactttagaaaacttgtacagtcatccctcggtattgttttctatttctattttttttattgttttttggtttcaaaatattttttatccaaagttgactgaatgcgtggaggtagaacctgtggatgcagaaccccatagacacagagggccaaatataattgcaaattctttctctgctccccccgcaccccctctctttttctttttgagacggcgtctcactctgttgcccaggctggagtgcagtggcgtgatctcggctcactgcaagctccgcctcccaggttcacaccattcttctgcctcagcctcccgagtagctgggattacaggcatgtgccaccatgcctggctaatttttgtatttgtagtagagacagaatttcaccatgttggccaggctggtcttgaattcctgacctcaagtgatctgcccgcctcggcctcccaaattgctgggattacagacgtgagccactgtgcccggccttctctgcgcctttgaaatgtaggtaaatcttctcctggtctcttgccagcgttacaacccaggaatgtctttttcaaggacctgggaattatccctttgaaatcatcaagggagatagcacccctatcgcccagtctctgtgggagggtaggagcctcactttgataattgacaatcagcaaactcagatggcccaatcacagagaaaaacatttgcagactcaggaataactccatgtgatggacacatcccattgacagaataactccatgtgatggacacatcccattgacccacctcccccattgtcctccaatatttttccattaactcacctagggcttaaccaccctagcatatttgtttcagtggagttgagttcagtctctttccctattgcaatctccttgaataaagtctgccttgcctgtgcaatttttctttgacagcagccactatggacactcaccaaactatgtcctcccttactgtcatcttgccaaatccctcctcttcccatcaggcctcacttcccagaacctgttttgcatacaaattattcttccttcctgattctccagtttctgccccaggctctcagtgggggtctatccagaccggggcagggttgtgctcgggggtctctggagagtggagtctggccaggaaggaggatggtttttctgaagcccccgtggaaggtggaggcactgaaggtcttcacagcagttgtcagtttcagggattgaggcttacagggtaggcagaccagtctggtgaatgcatgagtatgtgagtgctgtgtgcacttttgattctggtatcattcaggtacttttggagactttgaagtgtcagctccctgtaccttttgggagcatccatctggctgtcttcatctgcctggtgtctgagtgttcacgagtctgttgaatgccttagaattctgaatgccttagaatgttctcaaggatcttctgttgcattccatcagtttccacgcatggttccatttccaatcatgtttgcaaacatctggcctctcaaaattttttttcatatttgattttcataagcagtttactaaatgtgggtaccttctagggtttgtggcccaaatagttgagaagtatttagtatttcttgccttattggaaatgattccattaatcaaacaagtcataattgtaatgcgttttaagatattccctaagtaatgtgggtcatcccttgcttccagtcctcatgttctgcataaatgttatttcacacattatcagaattgtgaattttcttttggaactctagtcatgaccttgtcaaaaattggatcatgcagattgtatgccaatatattcttttgttattttgttatttttattttttgagaccgagtctcactctgttgcccaagctggagtgcagtggcgccatcttggctcactggaacctccgcctcccaggttcaagtgattctcctgcctcagcctcccaagtagctgggatcacaggtgcctgccaccatgcctggctaatttttgtatttttagtaga[148 bp omitted]catcaatatctctttctttcaaatcagatcttaattttcttttacagttcagtagtatcaagtgtattcatgttttgtacaatcaatatccagaacttttcatcttgcaaaactgaaactctttacccatcaaacaactcccctttcttctatccctcctccccacaccccctggcaagcatcattctactttgtttctgtgaatttgactactctagatcagggatccccaacccccggggcctggtaccagtacctgttaggaacggggccgcacagcaggaggtgagcggtgggtgagggagggaagattcatctgtatttacagcctctccccattacttgtactaccacctgagctctgtctcctgtcagatcagtggcttagattctcatagcagcgtgaatcctattgtgaattgcgtatgcaagggatctaggttatgcattccttatgagattataatgcctgatgatctgtcactgtctcccatcacccctagaggggaccatctagtggcaggaaaacaagctcagtgggccaagcgtggtggctcatatctgtaatcctagcactttgggaggctgaagcaggaggatcacttgaggtcgggagttcaagatgagcctggtcaacatggtgaaaccccatctctactaaaaatataaaaattagctgggcatagtgggcacgcctgtaatcccagctactcaggaggctgaggcaagagaatccttgaacacggaaggcggagcttgtggtgagctgagatcacaccactgcagtccagcctgggcgacacagcaagacaccgtctcaacaaaacaaaacaaaacaaaacaaaacaaacccaacaagctcagggctctcactgattctacattatggtgagttatataattatttcatcatatattacaatgtaataataatagaaataaaacgcacaataaatgtaatgctcttgaatcatctgaaaccatcccccactccccaggtccatggaaaaattgtcttccacacaatcagtctctggtgctcaaaaggttgaggaccgctgctctagataactcatataagtgaagtcatatagtacttgtcctttagtgactggcttatttcacttagcataatgtcccgaaggtataaccatgttgtatgtagcatgtgtcagaatttccttccttttaaaggctgaacaatatcccattgtgtggatacaccgcattctatttattcattcatccttccatcaatggacactggggttgtttcgcctctgggctattgtgagtaatgctgttatgaatatggctgtacaaatatctgtttgggaccctgctttgaatttttttggttattatatcaaatcattttgaatgttgcacgctcttgtggaagtgcccctcacctcattttctttcttttcttttcttttctttttcttttttttttttggcagagtttcgctcttgttacccaggctggagtgcaatggtgtgatctcagctcactgcaacctccgtgtcccaggttcaagcgattctcctgcctcagcctcctgagtagtagctgaatttacaggcgcctgccaccacgcccagctaatttttgtgtttttagtagagatggggtttcaccattttggccaggctggtctcgaactcctgatctcaggtgatccgcctgcctcggcctcccagagttgggattacaggtgtgagccaccgcgcctggcccaccttctaattttcaaataatttgtgatagctgtgctcacctgtgttgttgcaggctaggctctcctgggaggcagattgtgaggctgagattagcatgcaggaccttgggatcaatagctgcataaaggaggcaaaggaaactggattttgagcagagggtgagattgggtcctgattcagtcaatccaagggttcagtgcaccccagggggaggtctggcactgggcttctgggttctgatcagctgaggcaatgcccaaggggctgacatcagaagcagctgtcagagtccttcattcctaaagagatcttggtggcaaatcacagcatccaccacattctactcatttctttgttttagtgtatttttctccatctccagtgtattttttccacctctttgaaataaacattaattacagaatcctttgagattaaacaaagttacctgatctggtcatttattcctcagttgaaaaaattgatgtgaaactacttttctgtctaccgttactgtcttttggaagttaaatgctcttttttttgagacagagtctcactctgttgcctaggctggagtgcagtggcgtgatcttgactcaccactgcctcccaggttcaagtgattcttatgtctcagcctccggagaggctgggattacaggtgtctgccaccacgcctggctaatttttgtatatttagtagagacggggtttcaccatgttggccaggctggtctcgaactcctgaccccaactgatccactggcctcagcctcccaaagcattgaggttacaggcgtgagccactgcacccagcctaactgctcttatttaaggtgaataatttttaagagtttaaatttaagggtttaatatttaaatattcacatctaaagagtttaatatttaaattaggtggctgggtacctggattgacgaaaagaacatgtaattaaagggttcgtttattctccatttttcctgtcttccagttatttcttgaattttcttttcttggcttacccaaaagtggaaggagtaaattcatggtctgttctgctcaataattaatggatctgtgctacattctgccaaaatagcagctgtggaaattttttccccttgcaactttgtttttctcaaaaattcattcaatgatccactttgtttcataatagctttccattttctggtcctgattattttttgtccttgatagacatcgaataaggttaatattttatcttagaattttagcatcttacaatactatgtaggcaacaaatcattaaattttcataagtttatttttatactgatgaaatttctaaagcaataataagcaactactataatagtataattaacagacttgcataatactctttaatttcaacccacacacattctttgtggatgattaatggtaaccggatattagtttgttgtgttattgttgttgttgttttgagacaagagtcttgccctgtcacccaggctggagtgcaacggcgtggtctcggctcactgcaacctccacctcccgggttcaagtgattctcctgcctcagcctcccgagtagctgggattacaggcgcccgccactacacccggctaatttttgcatttttagtagagacttggtttcaccacgttggcaggctggtctcgaactcctgacctcgtgatctgcccacctcagcctcccaaagtgctgggattacatgtgtgagccactgcacctgaccggatattattatacagtgatttgtgccaagtgaaaggacttgtagatttatttatttatttaagacagagcttcgttcttgtcacccaggctggagtgcaatggcgaaatcttggctcactgcaaccttcgcctcccgggttcaagcgattctcctgcctcagcctctgtaactgggattacaggcgactgccaccacgcccggctcattcactgggctaatttttggtatttttagtagagacagggtttcaccat[137 bp omitted]tctggtagagtaaataattagatgaaaatatgaactgcaatatgaaatactgaatacagacaatgtgctggcaccattagggactttaacaaaatgttctgcatatcaggtggaagagcagctcattgtttagaagcacagactattttaaatgacataaaatcaacacgtctttccatttcaaaaccaatgtctccttagtatatggaagtagaatggtagctaccaaccctcttggaacaagacactttactgccatctgctggaacatagttgcaataaattgtaaatcacttttgcaaccgtcaatagcatgcacaatacataataattttcaaaaagttgttttcaaaatagtaaagatgtctgtgatatgaatagcacctccttaggtgtagtgttcttgtgcagtgcccaacatgaacaactgcacatggtgacagtagaatcatggcatctgcaaaacaaaatccattttactttttcctctccaatctttatgccttttttttctttttcttgccttattgtataggctagaactcccagtacatgattgaatagaattaatgagagtaaacatgcttgtcttgctactgatgttatatagtcgtgtgttttttttagacagggtctttctctgttacccaggctggagtgcgctggcatcatcatgggtcactgcagcttcaacttgctgggctcaagtgatcctccctcctcagcctcttgagtagctgggaccacagttgcatgccactgtgcctggctaattttgctagtttctacccttcccttccgttccctcccctcccctcccctcccttcccctcccctcccctcccctcccttcccctcctctcccctttctttcccttcccttcctttctttccgtttttctttctttctttcttttttttggacagagtctcgctctgttgcccaggctggaatgcagcgatcttggctcactgcaacctctgcctcctgggttcaagtgattctcctgcctcagcttcccaagtaagctgggattacaggggcctgccaccacgcctggctaattctttgtacttttagtagagatgcggtttcaccacgttggccaggctggtcttgaactcctgaccttaggtgattcacctgcctcggcctcccaaaggactgggattacaggcgtgagccactgcgcccagcctaacagaaaaatattttttaaataatagtaaatatataccagaccacccacagcgtgatcaaacacctttctttggcagcatttgtgtagtttctaatacagctttaaaatatgttcataaagaattattaaatatcctttgtatttatattttatttagagcctggagaaggctctaaataaaaggtgagaggtgaatattttgagttaacttgatataagcaaggtttcacagattaactttgaaatataggatgacatggggctgggtgccatggcttatgcctgtaatcccagcatttgggaggttgaggcaggatgactatgacagcttgagcccaggagattgagggaaaaaaaaatggataacatggaatagttgagaaacgtgacatcatgaaaataaaggtgatttttctaaattttattgcaa[139 bp omitted]agggcgaaactctgtctctactaaaaatacaaaaattagcctgatgtggtggtgggcacctataatcccagctacctgggaggcaaaggcaggagaatggcttggacctggaaggcggaggttgcagtgagcagagatcacgccactgccctctagcctgggtgacaaagggagaaagaaagaaagaaagaaagaaggaaagagagaaagaaagagggaaggagagagggagggaggaaggaaggaagggagggagggagggaggaaggcaggcaggaagactcattgatcatccatatagcaattatgtggatcaaaattgtcaacatttgccatatttgcttattctatctctatcttctgtgtcagcctctggtgcataggaaaccacaagcaaaatgtaggggcttaaaacatcaagcattttacccctctccaaatcctgtgtgtctcttgggttgttcttctgatatgggctggcttgactgatttctgctgggctctgtcatgtgcttgtggtcagctggagggttgggtggtggctggatgacccagaatggtctcactcacaagactggctgtcaggcaggcctcagttctcctccaaatggctagcttgaactttatcacatgggagttgcaacgttccaaaggggagcaaaaaagagcaacccctaataagcaggtgcttttcatgcctttgcttatgttatgtttgctaatgtcccatgtcccattggccacagcaagtcaccagggtatcccagagtcagtgcagaaggacactaacaaaaggtgtggatagagggaggggaatgatttgtggttattttttctatctatctatctatctatctatctatctatctatctatcaatctatcatctatctatccatccatccagctatctatcatcattatcatctttatcatctattatttgtctattactgttgaaccattaaaagcaagttgcagacatcttttgcttcactcctaaatataaattctggcataggcaagggtctttctccaattcaattcttcccttcccttcttttcagactatttttaaagggctaaataacttgaaacttgatcgttcatctcacattcacacaataattgtgacagtgataaagaacatgcagggaagacctacaaggccaactaattaaaatatttaaaaacattcatttttacccacaaggaaatcgtaggtttgagccacaacatttaaccagatttcttggagctcaaaggcagttctgcagtcaaatttatactcttttaactacacgcaaattaagggacagatgatgcagacatttctaggaaaagagtggtaacttctaggtcatcaccatggaaatgggtggtaacttccgggtattgccatggcaatggtaaactgacatggcacactggcgggagtgtcttatggaaagctgcttccacccaggccctgttttagctggtcctcaattaggtctggtgtctgagccccacctccggaatcaagtcccacctccgacctcataaagatattaaggacactgtaagaataaattcctgccccattcaggagatgtcttgtgtaattacgttactatgaggtagctggctggtctccttgagaagcagttgcatatcaagtgctcaggatcagcctctgctgctagcagattgggtactcagtagcggcggtaacttgattagtttcagtgaaaggtagcccctgcatggtgccctcccacagtaatgagtttatgcaagatctggttgttaaaaagtctgggaactccaccgtctctctctcgctctctctcttgccatgtgacacacctgttcccccttcgtcttccaccatgattgtaagcttcctgaggcctcaccagaagcagatgctggcactatgctttttgtacagtctgcagaactgtgagccaaataaccttctttccttataaattacctagactccggcattcccttattgcaatgccaaacagactaacacacaggcatagctttcacccttgccaccatggccactctgttcatgagaccattgaaccagcatggggctggctgaggagatggactgacttactttcatgggatggatcatccctgttgttaagagctttctttgtggggattattgttgtatttatttgtgtatttatgtatttatttattgagacgctgtttcattctgttgcccaggctggagcgcagtggtgcaatcttggctcattgcaacctctgcctcccgggttcaagtgattctcctgcctcagcctcttgagtaggtgggattacaagtgcacaccaccaagcccggctaatttttgtatttttagcagagatggggtttcaccatgttggccaggctggtctcgaactcctgacctcaagtgatttgcctgcaacggcctcccaaagtgctgggattacaggcatgagccactgtgcccaaccaaggattatttttagtaggaattaggatgagacacatatatgcatgcattttgtatgtacgcccataaatgtatccacatacttcttcctagacctacttgcccctgagcttccagtctcattccttacaagatcctgaccaaacagaaagccatgggccatttcccaggagcccatgtatatctgcacattgggccacatctcactccaatttaagtgaaggggccaggtgtggtggctcagcctgtaatcccagcactttatgagtctcaggcgggacgatggcttgagcccaggagttcaaaatcaatctgggcaacatagggagaccccatctctacaaaacattcaaaacaaattagcaggtgtagtggtgcacacctgtagtcctagctactggggaggctgaaatgaaaaaatcacttgaacccaagagattgaggctgcagtgtgctatgatcctgccactgcactccagcctgggtaacagagaaagacctgtctctaaaacaaacaaacaaacaaatgaagtgaagatctccaatcacagctctgtacaccaggatttaccttcaccactgcctgtaggacccacctctgagtagtggtcccgtaatatgataatttaggttcagcttccaaaatacatcagtcacactgatccatctgtgagccagaccttttcttccttaatattctacaggaaaatcttcatatgatgtcatgaatgtgaattaaaggaacaacatagctgcaaccaaggtcagtgacatgagagtctgagctgtctgtgtgtgtaactcttttgtgccatctagatctcttacaatgaattaatactgtgcccaaatcgcactatgacttagtgggttagatacccaactcatgacaggtagttttagtcatatagatacttgatgtcccatggtcaaaatcacagactctattagtactcagcagctggttttcaaattgaaagcacttatatgctgcataataaatggacttacttcagaaccttacgggctgtaattttgcttttgtatcttgccagagactccacataacagcttcaaccattatggatagaggtgacaccatcaaagttgctgattcatgtggctcagggacagggagattgcatcgcaggctttacctgctgtagagctctcacctgctttgaaactcagcagccttcaagtttatctgaaaaatgagtcagaacaaaattccaggccagtcatgatgggtcacgcctgtaatctcagcactttgggaggccgaaagtggggggattgtttgaggccaggagtttgaggccagcctgggcaatatagtgagaacctatttctaaaaaaaaaaagaaagaaagaaaaaggagtttgagaccagcatgggcaacacacggagaccccgtctccacaaaaaatttaaaaactagctgtgcacggtggcatgtgcctgtagtcccagttactcgggaggctgaggtgggaggatctacttgagccagggaggtcaaggctgcagtgagctgtgatcatgccactgcactccagcctgggcaatagagcaagactctgtctaaaacaaaaacaaaaccaaaaaccagctataaaagacacctagaactattaaaaaaagagaaaaaaagaacactattctgaagtgtgatttatatatgtatcatataaatcatatatgttatatataaacacacatctatatatacccatctattatttttattttattttattttatttttgagacggagtttcactttgtcaccctggctggagtgcagtggcgcgatctcagctcactgcaacctctgcttcccgacttcaagcgattcccctgcctcagcctcctgagtagctgggactacaggtgtgcaccaccatgcctaatttttgtatttttagtagagatggagtttcaccatgttggccaggctggtctcgaactcctaacctcaagcgattcacccgccttggcctcccaaactgctgggattccaggtgtgagccaccacgccccactctatctatctatctatctatctatctatctatctatctatctatctacctatcatgtatctatcactttcaaatgtcaaagagccctaccaaattatgtgcctgtttatcagtttaggaagtgtgagttgtaataacttattctttaccttaagggagatactatggcatgtcccagatgattggacttctaaaatcttcactgatgtggtaagttagtgaacattcatgaggtttatctccctctttctgtcactcatttgcattactatggcttctacagtgattgccacttcctgatcaccaggtcaaattagcatgattttattggtggaatgaaccagtgctatgttcttcagaatgtaaagatgatcaaggcctctgtggactacaatatgacggagattaggagggttatcaggaacctggggcaagacagtgctgcagtccttaccatgcacacatgaatggcttttaattctcctaaatgtcagagatcaagtaaaatacatttgtcagatcattaagcacatactaaggaccaaaaactaggttggtcaactccagtaaagatgtcacatctgacatagcagctgaaattggagctgctatttgtttacatttaaagtagtcactatgaattagctttggccacataataagtgatacggtttggctgtgtccccacccaaatctcatcttgaattgtagctcccataattcccacatgttgtgggaggaacccggtgagagataactgaatcatgggggtggtttcccccataccgttctcatgatagtgaataagtattatcagagctgatggttttataaggggaaaccctttttgcttggctctcattctctttgctggctgccatgtaagatgtctctttgttctcttttgctcttctgctatgattgtgaggcctccccaggcatgtgtaactatgagtccattaaacctgtttttctttatcagttacccagtcttgggtatgtctttatcagcagcatgaaaacagacgaaaacaatcagtaaccccaaaactcagaggcttgaaattacgaatattatttctcacaattctgggggctttctgagcatttcttttgctctgggctggtttggctgcagctgcatagtatagtcaggcctcactcaaagttctaatggttggttggttattgtgggggagggggcatgagaatgacttggccttatgtttctcatcatccctcagtctagttcacgcttgcatgaacccatgggagctgggttcaaaatgcaacaagaaagcagtttccattcagtgagtgtttttcaaacctctatatgtcacatttactactgtctcaaagaaaatcaaatgcacattcccagattcaaggagtggagaaattgactccacctttgaagggaagagctgcaaagtcatgttgcaaagaatatacacacaggaatgggaagaatttgtgggattttttttcaatctaccacatccactagcttcagtcatgcaggttttttgcaggggccaagtgaaatgaatggaggtatgatagggacaaataatcctgcatcctctaaattttgatgatgatgcaatctctgcaattcctcccacagcacagtattgagtttcaagggtttccacttggctctttataccataaggactttatttattttttttttttttgagatggagtctcactctgtcaccaggctggagtgcagtggcgccatctcagctcactgcaatctctgcctcccaggttcaagctattcccctgcctcagcctcccaagtagctgggattacaggtgtgcaccaccacacgcaagtaatttttttattttagtagagatgaggtttcacctttttggccaggatggtctctatttcctgaccacatgatccacccgccttggcctcccaaagtgctgggattacaggcatgaactactgcgcccagcccataagtactcttagttcacaagttaggaagccactataatgagttctaccagaagatgagcatatctatcccaaatatatgttaaaggatagaggaaaacaaccatagggtgagttcatggacttactgaactcactgtgagatcagacttgggccaaacatggataagtaacaagcttgaaatcctatcacaaggatcttgagggtctctcctggaaacactcctcttagcttacattgcctacagggaggaccctgagaagaagtttctgtgctattattttatcagccggtacagttccagggaagcaggagagagggaaaagtatagtgtggtagggaaggagacaacacttgtatgaaggtcttactgagctggccactgcttgctatcaagtgtaattgattgtttaattttgtgttttaagaccacctagctgaggagaagaagggaggtgaattcatccactggttcatgaaatgtttgtcccagagactattaactccgctgtacttccaggtcgcgtgtgaatagttcaatgggttctgtaacgtctcatgcatcagcatcaacaggaaagccctggggcttgagacaagtagtgcccattgcaggcatgaggtcaggtttcgttgctgcttgtgcccatgtagagttgttctgagttcatgcagggatgttgctgcagcagtgaatcaagagaaacaagtttccagaggccccaggcacaggtgaggctgagaggatctgaagtgacacataagatgtgtctgaactctttcttaattcaactcttgcatgcaattatctgagcctggtgatgattagagtttaaattctaaactactgatgctgtatcattaatgactaattgtctattattaaaagtttctgtctcttcttgtcaattctttaagttatagctttctaggaaattgaccatttcatctgttttcaaatttattctaattcaaaaaatattttctattcttgtgtagtctttttctttcttaatattatttgtgcctgttctcttttttattcatcttttgaaataatctattttttaattatctcagaaatggatcacttcaaataagcagttgttggcatttagcctctattgcatcagtgttttctatttctttaacttgtgcttattgttgacctcaaccaactttctttgtatttattctattattctgtgttctaacttcaagttggacatagccttcattcttttcatttttcccttcttcttcttcttctttttttttttttttttttgagatggagtttgctcttgttgcccaggttggagcgtagtggcatgatctcagctcactgcaatctccacccccagggttcaagcgagtctcctgcctcagcctcccgaggggtctaggagattagtgattattagttctagcgggttacagtgaccggtagcacaggagggattggcttcctttttctgaaggtgaaccgggtcttttctgtcctttttctaagtagcttaaataacacatggtcaataggcacaattttcacaggcctctaactcatgacccactaatcccctagacccccgttggaaaaaaggagaacgtgtaaccctggagatcgatgggtcagggctaaacccccaagttgcctttttagtttgaggggaggtacacaggcactctcccaaaccagtgtttcaaactttttatgatgagccgaatctgccaacaccagagcttccaaaaaggacaaaagaacttgtttctccagctagcggaaagtgtagctcatttcctcaatgttactttctgttatgtatgtgagggaaccactatgggagactgatggccttgggaagctagagagttggtgcccactgatccagttcctgacccaattccagttcagaaggcccaaattagcaacttctgggtcctaaaaacttcaattattggacaatactgtgtagctagagaaggaaaagacttcaccattcctgtaggaaagctcgattgtctagggcacactccagctgtcactctacacacaaacccacacacttgtgtcacagtcacagattcattccagtcctgtcatacaccaagcactttcttctttttgacacatacacacagtctgtcatacaaagagaaacacacctgctgtgtcatgagcacacatgcagtcacgaagacataccctggccatttcatgtgcacagatgcacacacaccccattccctgtgtcacaagacatcccagccgtggcacgtgcactctcatacagacgcaacgtcaccattcgcacggtagggcacatccttggctctatcacgcacataatattgcacacaccccctacaccatgtctgtcaccaccacggacggtccatcacacgcggccagggagacgcctgacctcgttttgccccaccccctccctcaagtcttcatacccagccacactgtcgccttcttcggctgctcgcattcgcctcattgcttctcccacccttacccgcactgccgactggggcatgagtccgcaacgccctctgcgcctcgccctgcttcgatgtctccttccgaaactacacgcggaacccaagaatcactgggatgcgcaaagcggatcaggagcgcacgctcattcggcccagtgacctgtgggaattgtagtcccgggccggaaacgcaggagacgccagaaacccaagtttgggacggcgcgtcccaagggtttctggaagttgtaacctgtgctccgagtgcgtaggcgcaggaacccttcgggggaatccctttagcagggagcgtatattgaagagtgcgtgcggaggtgagagcaataaactgataacggaaacagatggcatacttcgttttcagttatcaaatttcaaaaactaaaaatgtagatggtacacaatattgttgagaatgtggggaaatgagagctttcacacgtagtgggtggaaatgactacagctcttttacagttttgtgtagtagcattcacgaagtgtgaaagcaaacccctaagcaaccagcatttttacatacaagaatctagcctacaaaaatgctggcatgaaagacaaagatgtgggtacagtaatgcttaccaaagccgtgtttgtaatactgaagaattcacattgtaatactgaagaacctcaatgttcgttttttgagacactgttagtctgtgctagccaatatgatagctatttgtggctatttaaaattaaatctattaaaattaaataaaattcgaaattcagtttcttacactagccatgtttcaaaggctcattagccaagacagctagtggctactgtattggacaagagggatataaacatttctaacatcacagaaagctacattgaacagtgctgggttaggtaataattcaacgttaaaaggaatgaattaaatctataactgacatgaaatgaagtagaagaatgtgttgaagtggaaagggcaaatggcagaattatatggatagcatgatcccatttctgtataaaatagctgtgtctttatacatacattcagtgtacagaaaaatctggaagaatacctgaaaatattaactttggtcatttctgtagatagggaatgagtagggggacactttcatttctgacattatttatcatcagttatttgaatatttaaaaactgcaacaattaactgaatgttgctaaatccaaataaatatttttattacttattttgaaagatttttggctgccttctactatctcagcgacgtactctttcttgaaatactgaactactttagcttaatagacctccctcatttctgttttatctcctcactgaaaagcattagaacatctctacagctataccactctgaatgctcccgatctggtccgaaaagcattagaacatggaattacttgagtgattaaaagtaaaacaataagaaattgattgtggcatcagaaaaagtgaaatcagttggatcaatttaaaatcccaacataagttttttttaaaacgtttttctttttactttgtaattacaaaagcaatgcatgtttattacatgaaatatgaatatagaacaagtgcaataacagaaaagatccctgtagcccatggagtggctgaaaatgatgattgctagtgggtattggtgtctttttgggcaatgaaaatgttctaaaattgattgtgatgatggttgcatagctctttgaataaactagaaactactgaattcggccaggcacggtggctcacacctgtaatcccagcactttgggagactgaggtgggcagatcacctgaggtcaggagttcaagaccagcatggccaacatggtgaaacccctgtctttactaaaaaatacaaaaattagccaggcgtgatggcaggtgcctgtaatcccagctaatcgggaggctgaggcaggagagtcgcttgaacccaggaggcggaggttgcagtgagctgagatcacgccattgaactccaacctgggcaacaagagcaaaactctgtctcaaagaaataaaaaagaatctactgaattgtacactttaaatgggtgagttttagagtatatgaattatatctcagtaaaagtattacagaaaagcaataatctcagtgagctgagatcacgccattgaactccaacctgggcaacaagagcaaaactctgtctcaaagaaataaaaaagaatctactgaattgtacactttaaatgggtgagttttagagtatatgaattatatctcagtaaaagtattacagaaaagcaataatctgtgttaactagttaaccacctggaaaaataaagtaacttccatccctcacacattaaaacaaataatgttcacgacatgtataacttaaaaatagactaccagagtgcttatcaaattacaaattgatgttattataattttggtctgtaggcttgacagccaaaacacaaattatgaagtaaatagttaataaattatagaaaatataaagtatgtttcagtaaacttccctgcctccctcaaatttaagtagcaaataaactaagggaaaatatttcagatacaacaaacagataataaatttaaaacaaatcaacatatagatgaatacaaaaatgtgtagaaataggtaaagaatatagactcttagaaggaaaaattgaaaatgaccaataaatacttgaatgcatatgtaagct[136 bp omitted]catggagaagccccatatctactaaaaatacaaaattagctgggcttggtggcgcatgtctgtagtcccagctacttgggaaggctgagggaggagaatcgcttgaacctgggaggtggaggttgcggtgagccaagatcgtgccattgctccagcctgggcaactagagcaaaactctgtctcaaaaaaaaaaaaaaaaaagaaagaaagaaaagaaaaaagaaaaagaaaataaaatgttatcattggtttaaggactgggaaatggtcaaaacaattgtaaattttaagaagatattcattcacaatacttttggtgggaggaatccacttacaacctttctgagagtaactttacataaatatttaagagaagcatctcttttaattcaggaatccatttctagaaatgtagtccaattcggcaaagtttccgacgtacacaaattagtagctcttctatgcaccaacagcgaccaagctgagaatcaaatccagaactcaacaacttttacaacatctgcaaaaataaaataagataaaatacttaggaatatacctaaccaaggaggtgaaagacctctacgaggaaacttcaaaacactgctaaaagaaatcatagatgacacaaacaaatggaaacacatcccatgctcatggatgggtagaatcaagattgtaaaaatgatcatactgccaaaagcaacctacaaattcaaagcaattcccatcaaaatactgccatcattcttcacataactagaaaaaacaaccctaaaattcatatggaaccaaaaaagagcccgcatagccaaagcaagacaaagcaatggaggcatcccattacctgatttcaaactataaggtcatagtcaccaaaacagcatagtactggtataaaaataggcacatcgaccaatggaacagaatagagaacccgtaaataaacccaaatacagtcaactgatcttcaacaaagcaaacaaaaacataaagtggagaaaggacgccctattcaacaaatggcactgggataattggctagccacatgtaggagaatgaaactggatcttcatctctcaccttatacaaaaatcaactgaagatggttaaggacttaaatctaagacctgaaactgtaaaaattctagaagataacattggaaaaagccttctagacattggcttaggcaaggattttgtgaccaagaacccaaaagcaaacgcaataaaaacaaagggcctgggacttaattaaactaaagagcttctgcgtggctaaaggaacagtcagcaaagtaaacagacaacccacagagcgggagaaaaatttcacaatctgtacatctgacaaaggactaatatccagaatctacaaagaactcaaattagcaagaaaaacaaacaatcccatcaaaaagtgcgctaaggacatgaatacacaattctcaaaagaaaatatacaaatggccaacaaacataagaaaaaatgctcaacatcactaatgatcagggaaatgcaaatcaaaaccacagtacaataccatcttactcctgaaagaatgtctataatggaaaaaaaaatagatgttgccgtggatgcggtgaacagggaacacttctacactgctggtgggaatgtaaactagtaaaaccgctatggaaaacagtgtggagattccttaaagaactaaaagtagaactaccatttgatccagcaatcccactactgggtatctagaggaaaataagtcattatacaaaaaagatactggtacacacatatttacagcagcagaattcacaattgcaaaaatgcttaacaacccaaatgtccatgaatcaatgagtggataaagaaactgtggtagatatatacagttgaatactactcagccataaaaaggaatgaattaatgcatttgcctggatttatttatttttccttttttttttaagatggagtttccctcttgttgcccaggctgtagtgcaatggcgctatcttggcttactgcaacctccacctcccaggttcaggcaattctcctgcctcagcctcctgaatggctaggattatagacacccaccagcgtgcccggctaattttcgtatttttagtagagacagggtttcatcatgttggccaggctggtcttgaattcttgacttcaggtgatccagctgcctcagcctcccaaagtgctgggattacaggtgtgaaccaccatgcccggcctggagactattattctaagtgaagcaactcaggaatggaaaatcaaacatcgtatattctcactcataagtgggagctaaggtgtgaggatgcaaaggcctaagaatgacacagtggactttggggacttgggggaaagggtggaaagggggtgagggataaaagactaaaaattgggtgccatgtacactgttcaggtgatgggtgcaccaaaatctcacaaatcaccactgaagaagttactcatgtaaccaaacaccacctgtttcccaaaaacctatggaaataaaaaattaaaaaaaaatcagacccccaaaatattcagagtagtacttgtgggagtcattgagcaagtaacatgggaagagaggaggctgcttccaccagtggttttggaggtggagcagatgctgatgataatgaagtcccagatgggaaacggggatgggtgccgaggaaagctcaaggaccctgcagatgaggactcagacccacgatactggatgaggcatccatgtcaccatgggagtcaaccagggtagtggcctcagctgaggcaggggaaaagctgggatccaagagctctagtcttctcttgataagcaagagagaccaggaggtgagagatggcagaggatgagagaggtgatatcagtgaccagaaagagcccctaaaaagtaacttccttttctttctgttagttttaatataaaatttcgctttaatatttttagacaattcttttttaaaaaagtatttatatccaaaggttcttaccacaccaaccacagccccaatctttttgccctaacctcagaatcagttagttgtctcctttaaaacctttctctctctcacacacccacacacacacacacgcaaacacacaggagagagagagagggaatatatagtattgtttttggagtatgagtgtgtgcttcagaataaatggtttcatactctataaaaaatgagattcaaattttataatccatcaagttttattggaacacagccatgctggattgcttgtgcattgtttatggccgcctttgcactgccataagtctccacggtcacaatatccactcactaccacttattgttgtctttcaacagcggcatataaaatctgtaacacagttcatctcacacctaataaaacagactcacacaggcataaatttagaaaacatcccatgaacataaacaggtccacgcagggtcccagacaccgaatcgaactaagaaactccctcacagcaagacacacccatctgttcaattgccagacactgttccaggcgctcatacccaggtaaactggtagtgtcgcgcaggtcatttccagcgaacttaccccggattcccttgctcgctcacgtctaagtccccagacaccccagtcccatcttcgcctgttctagactccagaatgcgttccttagcgaaagctgagaaccttttaattcgctctcagtcaacaccaaagaccctcaagcaaaagcaagagctcccgggcgtcttcgaaaaaagcgcctttgacaggtgaagccaagttgcatgctgggagcatccctgctgtccaggtttcaacttccggagactctgccgctgtggactacatttcccagaagtctccggggcacaggccttttaggggcggggcgagcttgcctgccagaagctcctctcccagcctgcgagcatttccaggctcttgtttcccatcagcctctgggtccaaactaaccacaggtctctgggtccttttccggtgtccttaaggttcttggactctgcatggtgagttggtcgtgtctgtagaagtaatcagcccgggtgaagctgggagggctcggctggctttactggggcccgactggaaccggcagtgagggtgggggtggcatcgggggtgctggaggtggggagggctgggtcacggacagagcgtgtcgtgtccggatcctcaagcctgtgtgcacgcgagcagccgagggacagtgtgtctcagacggcgtggcagggacggggcgtgtccccacggaggtgggtgcagttgtgaatgtgtgacgggctgacagggtgcgtggccgtatttgtaaatgtgatttgctttgaccaaatgctctaggttccctttagcctgtcttcgggcctgccacaattaaatgaccgcaagaaagaagtctatgctaagccccataatgaacgtttcaagcaagaaggatgagaattttagatctggaagtgtccgcgggacaggatcttgtcaagacctgatggggaagttctagaggtgggattcctagaagaggggcctctaggagctctttggtggtgagctacatgtttcagagccattgcaagcagacctctgtccccaagaattgccctcaacacagagacagactctagcctcccttttcattccgtttggttttgtgtggatgaaggcagaagtggccccagagggtgttttgctcttctttttcttttttaattaagtctgtgacgcgctagaaatgctgatgtctcatgttactgttttttcccccagtgctgccaggttgccagatttctaagaaggagtttgaagaggagaaaaggatttttgcatgtttagaaatcaaggttcaggtgaggttttttatacatactttttaaatacatacacatacaattacctttgcttctaggtcatgagaacattttctttccttggcctgaaatatcttgactgggttttcccagttacatgacccgccatgctggtacatatttcctcccagtggccccctattgttcttctccacaattcttacccacctgttcatatggcaaattgttcaaatacttcagtgcattatgatgcactgaagagttatagaaaggcacctcttgtagattgctattagagcattattttatactatgattatttgaagagattagtaattaggtggtgttatataaacattattttttatcttttctgtagtcataattaaaatttttttttaactttttttagagacaaggtctcactctgttgcccaggctgagtgcagtagtatagtcatagctcagtgcaaccttgaagtcctgggctcaggtgttcctctggccttggcgtcccaaagtgctgggactgcaggtgtgagccaccatgcctggcccatagtcatgatgcttaaagaaaggcaaggtataagggattttaagtaagggaatgtttctggcagtaaatgacaatgttgtctgctttgtgaggcttttaggggtggaaatatgattgagctttgaacatagggatttgtaatttgcaccaacaagagtggggactttcagataatctttagatagaaatctgtaacatttccaagcatgacttgtttgaagtccagctttctgtggcatgta[136 bp omitted]cggtgaaaccccgtctccactaaaaatacaaaaaattagctgggcgtagtggtaggcgcctgtagtcccagctactcgggaggctgaggcaggagaatggcgtgaacccgggcggtggaggttgcagtgagccaagattgcaccactgcactccagcctgggtgacagagagagactccatctcgaaaaaacagcaacaacaaaaaaattaaggctctggatccaaagtatctgaattcaaatcctggctctgcctgttggtagctgtgtgtgcttagacaattgattcaggccctctgtgccacatctataaaatagggacaggatagtacctacctaatggagttgatatgatgtaagatgagatattatatgtaaagcttcgtagagcagtgtcatccccatgatatgggcttactgaatattgagttgctattattgggctcttctagattatttcccataaactttttatagattagagtaacagaagtatgaagttgattgtgacgggtgcttgcaaattaactaaaaaagtgggggctgggcacggtggctcacacctgtaatcccagcactttgggagtc[135 bp omitted]gaggcaggagaattgcttgaacccagcaggcggaggttgtagtgtgccgagatcgcgccactgcactccagcctgggtaacagagcaagactgtctcacacacagacacgaaaaagtgaccacatgctcaaatgatctaggacaggaacactttttttgtttgtttgtttaaacaggttcttggccttttgcctaggctggagtgcagtggcatgatcatggctcactgtagccttggcctcctaggctcaagcgatcctcccacctcaggctcccgagtacctgggactacaggtacgtgccacaaagcctgaccagtttttgttgtattttttatagagagggggttttgctatgttgcccagcctggtctctaactcctggactcaagtgatctgcctgcctcgggctcctcaagtgctaggattacaggcgtgagccactgtgcccagccttacgacaggaagtcttaacctgaggtcttcttgttccattgacgagcttccaggtgaccaaaatcccttgaaattgagactaaatttttgtaaatatgtgtaaatgtgtttttttaagtgggcaaagtgtctataatttcatgagattatcaaaagtgaccatgacccaaaaagatctagctccattgttctggaaaaaagactgtaattgccgggaaagagcttgaaaaatattagtgtccagctgggctcagtggcttatgcctgtaatcccaacgctttgggaggccgaggcgggtggatcacttgaggtcaggagttcgagaccaacctgaccaatatggtgaaatcccatctgtactaaaattacaaaaattagccgggcgtggtggcgtgcacctgtagacccagctattcaataggctgaggcaggagaattggttgaacctgggagacagaggttgcagtgagccaagattgcaccactgcactccagcctgagtgacagagcaagactccatctaaaaaaaaaaaaaaaaaaaaaaaaaaattagtgtccaatagaatggaaatagtcaagtaaattgcagtatgtctagtgatggaatgatatgcacctaataaaaattaagtttataaagagtcaaaggaaggaaaaatataaatgatataattttaagcaatcattatagttatgaacaaaagtgctcaagaatattgtgttatgtgtcaatcccatctgataagacacggttttggaagacatatttcaagaattacattaaaatgttactttaattggtcattcactgaagaagtggaaaggtgcagccgtacttacagagtatctactctataccaaatactgttttgtttatgcacatttattttcttcctcagactttgaaggtggtttatctcatttgtgttgatttacaggagaatcttgacagtgaatgtgtctcattacattgaataacagctacaggatgttcgagagctggtaggtgtaaattgtttcaggcccactgattttcagtgttggccccgtttgttcagttttcttaatgactggaatatattcctcctgtcactcagttttttacatttggaaatgtctttatagttccaattatggaattaatgcaggcttggtccaaaaaaaaaactcagcggtccaggagacatatagagaaggaagctaaaaattgcatcctctagagttaatcatttttaatgttttggtgttttttttctttttcttttttgagatagtttctcattctgtcacccaggttggagtgcagtggtgcaatgtcagctcactgcaacctccacctcccaggctcaagcgatcctcccacctcagagggaaggtagctgggaccacaggtgtgtgccaccatgcccagctaatttttcatgtttttgatagagatggggtttcaccatgttgcccaggctggtcttgaactcctgagctcaagcaatccgcctcctttggccttccaaagtgctggaattacaggcgtgagccaccacacccagcactttggaatatttttatttaaatcctttttcctttgagcctatgggtctgttttttttttctttttttctgcagaataaaattatagtaattggtgatgtaaatgaattgaagactctttagttcttagtttgaaaaaaaaatccaacccagttctaggttttatgttaatcttgaatatttagggagaagagggaagtactagtgattcccttatttgaaaaccttcaaatatttacaacttctgggattatagaaatgtcatttaaaaatgaattaccaggcaaaaaagagttttagaattagattattttaaaggttacctctacagacaatggcaataatctccaatatacagccatcttacaaaaaatacattttacagataatatttccaaggacaggtgtaaataccaggaggtagaataagaaggttcttgttgtaaatgtttaagtaaaccaccaatttgtacagaagactgagcctttggttaagttctcagctttatacctaatcaggttgtattttctgatgcagcttaatgatgctgaatctctatgtaacttctgggaggaaggggtattttcctctatatgtttctgagaacctgttttgctcacattgttatttaggaagaatagcagactcaaggttgacctgtgaaatttgagttcacgttataagaaagcaggtctgagaaagacacattttactgtgagcaaaatagagtagccttaagtttctttggcataacaggataagggacagtaacattcttcattttcaataataatgatgaaaatgtggccaagcctggtggcttgcacctgtaatcccagcactttgggaggtcaaggcaggaggattccttgagctcaggagttcgagaccagcctggacaacacagtgagaccctttctttacaaacaattttaaagaagaatcattagtcgggcaaggtggcgtgcacctgtggttctagctactggggatggaggctgaggtaggaggatcacttgagcccaggaggttgaggctgcagtgagctgtgtttgtgtcactacactccagcctaggcaacagagcaagaccctgtctctgaaaaaaaaaaaaaaaaaaaaagacaacttataaacaattatcatataccattcagtattttgtatggatttcttacttactcttctatggtagacactgttctcacccgtcttactgatgaggaaacagaggtattgagaaatggataactatcaagctcaaattcacatcctaaagctctcacaccagaacttttatcttaatttcaatagaatatgcctcccacattatgttagttacaaaccggcctgcctaaggaattgatcatgcatgtctttcttcatcaattaatatgaaccaacaccatcataactaatgaggatatggtgggccataatttattaaaccttttgcttactattacgtagtttctcatttttggttaccagaaattatttttggttgagtacccttgtgtattcatcttg[136 bp omitted]ctgcctcagcctcctgagtagctgggactacaggtgcccgccaccaca[136 bp omitted]gcccttctttacctatttcttaaggatacatttctagaagtgaagttttgggtaaagaatttgccccaaatgcctgaccctgtgatacttgtacttagcgggtaatacagtgtttggaagacatagttgttaccttggagaccaaatatgccttggggtaagcataaggcagccagcagtcagcaacaaaggccagtaggcaatccaggggacctgctttaggaactcataggaaggcagttataagcaataccgttgaaccatgatcaagcatttggaggcaaatggaatttattctgtaaggtttatactttatagtttttattctactaatgttggttgcaaagtgagcctaataggatcaggtgattcagttatctggattcagttatctggagagtaccatgtctaagacaggttcagatacaaaataaatccatcagtcaagataagaaaagtagaatcaaaacctcattaatggaaggggaacaaaaaaataaataaaacctcccctcaaaaaatgaaaaaaaaggatgaaattcctcaacttaggccatgaatatattaatatcatttcattaatattattccattagtattattccattaatatatacatggcataacttggggaatttcatcctttttttttctaggcaagacataggcatatgtagaaattatacagttcatgtaatgtatggccatggttacaatgattgtgtggattacctaaacagaaaacattatgatcataatgaaaagataaatgttattaatatatatagatatataattttattttttattttttattttatttatttatttttttcgagatggagtcttgctctgtcacccaggctggagtgcagcagcgcgatctcggctcactgccagctctgcctcccgggttcacgccattctcctgcctcagcctcctgagtagctgggactacaggcgcctgcca[131 bp omitted]cacctcacctggcctgtttctttcttgagatgtataactttctaaacattttttcatctattgatgtgattgtcagtctttctgtattgatatatatgtattttataaatgtaatcataagtctcataacctcctttttctattgagtatatcttgattatttccctaagttagcatgtactcattgcatgatgttctgcgtcatgaatattctgatatatgcattagaaagtcagctttttgggttcctgatgaattccttatacagcctgtccagctcccatgttttgaccaacttccttcagtcctgagcccatgaaggacgttctagcttggaccatgacaggtattcctgagaggtaggaatggaaggaggatgatctgatttcctgggcaggactgaattgtcgaatcccaggtccagattcacatcctcagaaccagacactgccagaaacctccctgctgaagacctttggggtttaggtgaaagtttgaattccataaatggtgcgtggggtgtgtagcagaagcaggcatggagaagataagatcttctattagtgtaagtcaggatgggatcactgaggcacacctggtttaacgcttcgttttccctccccagttctggcttttctggattctgtgcttcaccaatagaggaatcccatggagcattaattagttcttgcaattccagaaccatgactgatgtaagttggtatttttctctccatgaaatactgtgatttttagggcgtgtgaatcttttcattaattttccttagacctatagaacttctccatagacccaagttttccacagagataaggactttggggttgcttggtctcaacctcagtttatgtgaagctgcatgtgttgggaggcgcttcagattagagagaggggagttaagtggttcttcccaggaatttcctaagagatgaagaccagtggtctttggagtcaccaaaggactccaccaccagtggattttgaaccagttgactttgaagtcattttgtcgtcaaccaggatgtgtaggccatgagtgacatttgtgtcatgtgcaatatcctatatcagtatcctcatgtgtcttgtatcagtactctctaactcagggacaagtgaagtactaagcgaggggtagttgatagtaacagataagatgatgcctaaggtctagatgataatatatttccacgatcaagaaaatctacagaaattttgttcagcctaaatgtacagatataattgagtgactaagctcatatattggaggataaaatgaattgcaacaaataaaaatactgtttattcatcataagaaaaaatgcttatgatgtaatctaacagtgatgtatttgagtcttgatagtccctaatttaatgggaatcatttttataaaataaagattttgtagtacatttggaaaaaagttttcatgttttcctatttctttctttctttttgagacagaatcttgctctgtcacccaggctggagtgcagtggcacaatctcggctcactgcaacttctccctcccaggttcaagcgattctcctgccttagcctcccaagtagctgggattacaggcatctgccaccacacctggctaatttttgtattgttagtagagatggggtttcacatgttggccaggctggtctcgaactcctgacctcaagtgatttgcctgcctcagcctcccaaagtgcttgggattacgggcatgaaccattgcacctggccttgtttttatttcttaaaggggaaagatggtgagcaattcacttttacaaagaatttatgaggaaggcacatagcacattgtaaatctgcatgatgtatacgcaggcactttttatataacagagaagaaactgagatttttaaaatatattaccagacagatctggatagctgagttatctcacagtatccgggaagttttttctgctataacaagattctcgtagaacatgttgacatcctgctttagtcacagattttcttgctttttcctacctatatcagaggctttcagcctactcgattgttatatttctccccctctttgtagttcatcctttgtaccctcttttttcctcttggaaatgttttctttaatttcacaagtaatacatgggtttttggttttaggggttggtgacattcagggatgtggccatcgacttctctcaggaggagtgggaatgcctggaccctgctcagagggacttgtacgtggatgtaatgttggagaactatagtaacttggtgtcactgggtaaggtcatctgcctgaaataatttagagtctcctctttgcatcatcagttttctgcactggaaattacagggctatctttgaagaaaccaggtgaatttcttctcccccttcccaagggcatgcttttatacttgctgggttagaaatgggtttgttaaacacgttgatcttccccatccctcagtgagctttacaccattctcgggccctccctgcaatcacctctctcctttaatggccaaggggctggatttgcattatagaacatttatttcataactatggcaaagaaaccagatttcataaattctgcaaatattatattgaatatctactcctggccagccttgtgctgagcactgtcaattgaatcatgaacaagctttgataacttgcccattttcgtgcagtttactttgtagtaaagcagaaacatcaaataagtaaatttataaatagataaatagtatgtaatgaagcaaattctttggaaaaggtaaacagcataagggaatagaaaatgatgaggactgacagggctaatttaggtaagacagtcggggaacgctttcttgaacagagatgtggagcctgggatctctatgtgaatatctggcggaggaacagatcagtcacagtgaacagcaaatgcaaagaccctgttgttggaaaggaactttaccagaactctagagtagagttattaaaggaacatgtactaagaaattaggccagggagataggaaggggccagataatacattgttttgttgttcttgtttgtggaatttggattgtttagtctctttcagtctgaaacagttcacatgtctttccttgacttgcgtatatgtctgtgatgcttttgaagattacaggccagctattttgtatagtgttcctgaatgtgggtttgtctgctatttcttcatgattagatttagaatatggatctttggcaggattatcacagaattgatgctgcgttcttctccctgcattttgttgggtggtatgattaatttatcattactcatgttattcactctgagtacttgattaaggtagcgtctgctggcttcctccttgtgcagttgccctttttcccttccacaactattttgtggggaggaactttgaaactattaaatattgtggaactgggcacagtggtggctcacacctgtaatcccagcactttgggaagctgagacggttggatcacttgaggccaggagttcgagaccagcatgggcagcatggcaaaaccccatctctacaaaaaatacaaaaatatttgctgggctgtggtggtgcgctcctttagtcccagcaactggggaggctgaggtggctggattgcttgaacctaagaggttgaggctgcagtgagctgagattgtgtcaccacactccagcctgggtgacacacaagaccctacctcaataaataaataaatattgtgttcctctttaaactttccatttattcatatgttcgctttctagtcaatgggctatattctgttttttttctgttatttattttgaagctcaaagtgttggagcttgtccagatttagtcagtgggaatcctttcatgatatggctttttggcacatctccgtcactctttgagtacctcctggttttctgataaacaaggtgttagaggttcatcttgtatgaaatttcccttgtctagttttacaatcagctattgctttgaagtgcctggttactttcacacagatttatagttattattttatgcatttgtcttttaaatcaataaatcaaaagtacaataatactaacttttatatttactcatgtagttacctttaccaatgttctttatttctccttatggcttctaattactgtttagtgtcctttcactttagtctgaaacactcttgtctaacatttcttctagagtaggtctactggtaatcacctccttcagcttttgttttttctggaaatgccttaatttcacctttattcttaaaggacagtttttgctggtatagaattcttggttgacagttttttttttcttttggacttttcaatataccatcctgttactttctgttctctgtggtttctgatgagaaattagctgttaatcttgttgcagattcttgtatgtggtaggctgctgctttcttcctgtgttctgaagtctttttgtctttgggtttccataatttgacaataatgtgtctagatatgaatctctttatcatgtctgaagttgttgagcctcttggatgtgtgtattcctgccttttgtcagattttggaagttttcagacattttttcttcaaatttttttctctacttttgtctctcttctttttctgggactcatatgatgtgtatgttggtgtgcttgatggtatcccattgatccctcaggctctcttcactgttcattattcctttttctttttgcttctctagtgcaataatttcaaatgactcattttcaagtttgctgagtctttcttctgctgaatccactattgaaattttcatttcagttactttactccagaatttgtttggttccttttttttataatttctatccttttattgatattttcattttgttcatacattcttttcctgatttcctttagctcttggtccatggtttctgtagctcattgagcatatttggatagttcatttaatgtctgggcttcctcaggaatggtttctgtcagattcttttttttcctttgaacgggccccatattttcctgtttcactgtatgctttgtaattttttttgttaaaactgggcattttgagtattataatgtggtacctctggagattcaattttcccattcctcaggcatagctgatttctgcttgttgagggctggagctgtcagattttttcaaactctttttgcaaattgtatattccttattgtatgtggtcactgaaatttctgttccatcatctctacagtcagttagtaccagacaaagatttacttaaatatctggctgtaaaaaggggaggaaaaaaaggtccattagccctttaaatcttccaatagatacttctggggaaagctgctgtggctgatggggctaaaatcaaggcagttatctgtgctggtccctcaaggtaacacaaaacccaccaaactgcacaaccctgaattttttggaagacaaggtcacgctgcccacccaggtcccaaccggctgttccaggaatacaggctgctctccccacagctgtggtggagctgaggagtgaaggaagtgattagttggtacacagcattccaggcacataggcctgtcatcccatagcattggctggactgagaaatgggggatggtggcttgcacgagccactctttcacctaagaatagtagcctctttattcatccagcactccccttgttgttatggaagtgcctgataagattccagaattaagagtttgtggatgccaatctctctctctcttttttttttttgagatggagtcttgctctgtcacccaggctggagtgcagtggtgtgatctcggctcactgcaagctctgcctcccaggttcacaccattctcctgcctcagcctcctgagtagctgggactacaggcgcctgccaccacgcccggctaattttttttctccttttttttttttattttttagtagagatgaggtttcaccgtgttagccaggatggtctcaatctcctgacctcgtgatccacccacctcggcctcccaaaatgctaggattacaggtgtggcccaccgcacctggccaatgacaatctgtctttccagctcaattgttgctttgatggaggtaccagcccttagagcttcctatttcatcattttgtgtgacatcactcctacatattcatttaatgtcactattgatatggttagatttcagtttactatcttgctattttttgtttcactagttctttcttttgtttccaccttcttggattcatcaagtattttttagtattccattttatctcatctgttatcttttgctgtattatttgtatttacttttgggattacaatatgcatccttaatttagcatggtctacttgaaattaataacatactactttgttgtataatgtaagaattttactaatctgtaaacttcattcagcctgaaaagcttcctttagcatttcttgtgttatatggctactagcagctaattttatcttttttttttttttttttgagacagtctcactgtgtcacccaggctggagtgcagtgccatgatttcagctcaccgcagcctctgcctcccaggttcaagcaattctcgtgcctcagcctccaaaatagctgggattacagtcgtgtgccactatgcctgactagtttttgtatttttagtagacacaaggtttcactgtgttggccaggctggttttgatttcctgacctcaggtgatccacctgccttggcctcccaaagtgctgggattacaggcatgagccactgcacccagccttcatctttcttatttttgaaggatatttttaccagatatgaatttcccaactgatatattttttcttttagttagcttcaaaaatgttccattatcttctgaactctattgtatataatgattagacagctatgattcttattgttcattttatatatactttattctctgttattaagttttttctttatttttggtctgtaataatctgactataaagttctagatatggttcctttacatttatcatgcttcactttcccttacctttgatcagtgggttgatttttttattgaatttggagaaatttcaaccattgtatcttcaaatacttttttctgcttctttagtacttttcctcctcctaagactccaattatatgtgtgttagaccacttatatggtgccaccagtcacggaggtgcaacccccagtctttttactctttgtacttcagtttggtaatacctatttacctgtcttgaagtcactgttttttttttctttgatagtgtccaattattgttaagcctatccaataaagatttcattccacctacattttatagttatagaatttacatttggttttgtgggtctgcttttattgactgtattttctctaaatcttgtgtcaaattttcctgcttctttaccggtcttacaatttctcattgtatactggccattgtagatgccatgttgtagtgacttggggattttattatcttcctaatagttaaactgttcaggcaagcagttaaattaatagcagatcacaatgatctttttaagagttgatttttgaaggcaggtacagtttggttttatccttagtcctggacataattcttactctaggtagggcagtggttctcaaactgtggactgaagacccctgggagttcccaagaacctttcagtgggccaaacctttcacaaagtgaaaaatattctcataacaatactgagaggtttgcctttttcactgtggtgacacttccactggtggtgtagaagccatggtgaatcttctctgctttagcatgagcaaaggcagaggcaccaaatagtactagtaatcatcatattctttacctccacacacaaagaaaatgtgttaagaaaaaacccattttcacttaagaacatcttgaagaagcagtattcattttattaaatctcaacccttgattatatatacatttaaaaaatattctatgtaatgaaatgggaagtatccattaaggtcttctgctgtataccaaagtatgatggttgccttgaagaaaaccacttgtacagttgtttaagttgtgagttaaaggccaggctctgtggctgatgcccgtaatcccagcattttgggaggccaaggcggacagatcacaaggttaagagatcgagaccatcctggccaacatggtgaaaccccatctctactaaaaatacaaaaattagctgagcatggtggcacgcgcctgtagtcccagctactcgggaggctgaggcaggagaatcgcttgaacccgagaggcggaggttgcagtgagccaagatcgtgccactgcattccagcctggtgacaaagtgagactacgtccccacccccaaaaaaattgtgagttaaaccaactgcttttttgacaaaacaccatatttttcaccaaagaatgaaaaactttgtttgttcagacttgggcagtaggaaaacattttcttgcaagtgagcctgtcacttcaaaaataactaatatttgttgccaatgatataattcaatctgtcatgttaaaattagaattttgtaaaatgtttattcataattttgagctttatagcttcctaatacattaagattttttatgagatgggtggtaatattaacatgtgattttttgatgttgtatagtgaactacgtcaacatttcaaagatctgcataactctttgaatcagtattttccaaatgaccagtgtatgatgttacaaaattacacatggataaaagattattcaaagtgcaatgtaacatagtatgaaaagttcacagatatgattttatattccacattgtacttaacctgccagacactaccatttcttaagttttagggtggtgtcaaagaaaaatatccacagttatctgcatggactagtaaaatattctgccattttccaactatgtaccatgagaggctagattttcttcatatacttcatatatatgattttcttcatatatttcaacctaaataacatattgccatagattgaatgcagaagcagatatgagaatccaggtgtcttttattaaaccatccatttaaaagatttgaaaaaatttaaaacatcttttgttttgttttagaaaagattatttttataacaaatcatttatgttaacagttaatggtttattgttattttaagtgaattagtaaatatcttaaaatttctctgtttaaatttttaacatgacaaatatcaaaatatataactacataaactaaaagtcttttgggtcctcaatgatttttcttgacatttaagaagttaaacccatatttatttactgacactgtaaaaccttacataaaacataagtagtaagtaactaaaatgttaaatctaaatctataatgttaaattaaaatctaagccttacatagaaattaaaattcgctaaactactgatgctatgttgtacaaaactgtactccttttagttcataattggtcacctccatattcagttggaatattaggttggtcagcttaaatactgtggctttgttttggttatccacagaatctttacacccaaatgttaatgcataaaaagcagcaagacattgttaaatgaaacagcaatagtgcagtttagacctgtgaccaactatatatgattaaacttacttcccacattcacatcacaataatcatccatcatttaatagctcaaccaaaatgttatacagtcatcaacaggcaaggcacatgaaaaccccgcacaaccaagaatgatttgggcccaaatgtcagtagatttgagtttggaaaaaccttcttgtagttgttaaggctcaatggctctggttaatttaatataataaacaacaacttcataatggaaaaaaattaaatcctctattgaggtataaaacctaattaatttataaggataaagtaagtgactaccttgaagtcaaaacacattatggacaatgaaagagtattacgattgttccaaattgacaagggtatttaaacctaggtacacaatctttcttaaaattaatttatagaaagtcataacctgtgggtacatgaatatgaatatacatcttctccaacttgacaagtacattattgctgggacaggtaccttttaataacaagtaacttattagcctagaaaggccaaacttctctttttattgtcagcttttggtttttaatatacctggggttatataaacaaaaacacagtcatagtagttttgggctaagtaaattctggattatgtcaaagaaacctgattgtttctagtatcttttgtaagcgaaagagcaaatctttgtgcttgctcagtggccttttaggaaacctgaaaggcagattttatgtgaaagacataatctgttacaatctgtttcattattctgaattggaaaaggcattaacaaaaagagttgtcagaggagcttttgacaagaacaatagttgtgactaattaatcagaacatcaacacaatatttaaaataatgagaaggtagcaagattttaatttttatttaaataaaaaattctgttctatttaaaaatagtttagatgtgtagtataaggtagctaaaagcatgaaaattatttgactcttaaaatttgaagcatacacagaagtgtggcaaaattatgcagatttattttcttcatgtattgaagaaaaagaataatactttaatttcctcatatagagtggacagtttactccaagatcatcattttcccttagctagcagtcttttctatcatatcatacttatgtcacttttttcatacattatatgacatagcatttcccatatgcatttaaacctgctaatattgtcaatataccatgctgaatgacactataatttaaagctttattttcaattttaaaatataattaacagtattaatgtgttataagatgatgtgtgtatcacattgatttttgacagggtagtttgagcttagttgagtgaaaatatgtttaacaatggtcaagaaataagtaaacttaattgaaaaataactcaaaatatttgttcttcctcttttatgaatatcttcttaggaactttttatgcaaccagaaattatttattagtaactctcaagatcattttgtctaagtgaattggagatcttataatttaaagtgatccttaaatagcaatacaattactgttgatttttaaaattgatagacatttaaaatttttaaataaggtaaaatctatagagtcacataattgcagcattatatgaagttataaaaatcaatccttttataaaaattctggctaataaatctaagtaaatgtaaaatttaattgaactttatatttttacaattgtgaacatttatgaaagcaatgtttgctttatctcaggggttggaaaactctggctctggaggccaaatccacctgtttttgcaaataaagttgtattggaacatagtcttgcccatttgtttatatgtttacatattgcccatggctgccttgataaaatggcagagttgcgaccattgagttgttagacaaaagagttgttagacaaaacaaaatcagccaaagctcattatgataagaatttgattcccattaagatacattggatgaccacaactgggcacataagggcttgattgatggaagctgacatttggtttgagggaacatcagcgtgggaaaatgagggacttgttgaagcgacctctgtggaatcctccagaaaactataaaatcagaacattcagatcacaagagctgcaaaatcaaggctgagtttgttatttaacaagggagtgccttaatgccaaggagtgagttcagtaagtctcctaatttgtcttttatttctactgtagtttttttttttttttccctagtgaaggaaataaaatgtgtggttttcttgttttctttcagatttggagtcaaaaacgtatgagaccaaaaaaatattttcagaaaatgatatttttgaaataaatttttcccagtgggagatgaaggacaaaagtaaaacccttggccttgaggcatccatcttcagaaataattggaagtgcaaaagcatattcgagggactaaaaggacatcaagagggatacttcagtcaaatgataatcagctatgaaaaaataccttcttacagaaaaagtaaatctcttactccacatcaaagaattcataatacagagaaatcctatgtttgtaaggaatgtgggaaggcttgcagtcatggctcaaaacttgttcaacatgagagaactcatacagctgaaaaacactttgaatgtaaagaatgtgggaagaattatttaagtgcctatcaactcaatgtgcatcagagatttcatactggtgagaaaccctatgagtgtaaggaatgtgggaagacctttagctggggatcaagccttgttaaacatgagagaattcacactggtgagaaaccctatgaatgtaaagaatgtgggaaggcctttagtcgtggctatcaccttacccaacatcagaaaattcatactggtgtgaaatcttataaatgtaaggaatgtgggaaggcctttttttggggctcaagccttgctaaacatgagataattcatacaggtgagaaaccttataaatgtaaagaatgtgggaaggccttcagtcgtggctatcagcttactcagcatcagaaaatccatactggtaagaaaccttatgaatgtaaaatatgtggaaaggctttttgttggggctatcaacttactcgacatcagatatttcatactggtgagaaaccctatgaatgcaaggaatgtgggaaggcttttaattgcggatcaagtcttattcaacatgaaagaattcatactggtgagaaaccttatgaatgtaaagaatgtggaaaggcctttagtcgtggctatcacctttctcaacatcagaaaatccatactggtgagaaaccttttgaatgtaaggaatgtgggaaggcctttagttggggttcaagccttgttaaacatgagagagttcatactggtgagaaatcccatgaatgtaaagaatgcggaaagaccttttgtagtgggtatcaacttactcgacatcaggtatttcacactggtgagaaaccctatgaatgtaaggaatgtgggaaggcttttaattgtggatcaagccttgttcaacatgaaagaatccatacaggggagaaaccctatgaatgtaaagaatgtgggaaggcttttagtcgtggctatcaccttactcaacatcagaaaattcataccggtgagaaacctttcaaatgtaaggaatgtgggaaggccttcagttggggttcaagcctagttaagcatgagagagtccatactaatgagaagtcttatgaatgtaaagactgtgggaaggcctttggtagtggctatcaacttagtgttcatcagagatttcatactggtgagaagctttatcaacgtaaggaattcgggaagacctttacttgtggctcaaaacttgttcatgagagaactcatagtaatgataaaccctacaaatataacgaatgtggggaagcctttctgtggacaacttactcaaatgagaaaattgatactgatgaaaccttatgattgaaagttgtaaaagaatattttgtgtgtgtgtatagacaacttatcataataagaactcttactcttgagaaaccttgtgaatgtaagggttgtgcaaaagccattcatttctgtttatgggcaattatcttgctatccagcaattcatactagtgagaaatattttgaatataattaatatgaaaaggcctttagacttctgtacagtcttattggatatcaatttatactgatgtaaaatcatttaaatgtaaggaatgtgtgaagatcttcattcatgacataaggtctgattaacatcaaataattggtatttgttaaaaagagtttaaataggaggaatgtgggaaggacctaaacttaattcagttcttgctgcacatcagagaattcatactgctgtgtaatcctatgcacataaggaatttgggaaggcttatagacacagtaaatatcttagagtacatcagagaattcatccaaatgagaaatcatttgaattagaattataggaaggcctttagacaaatgctacccaaattattatccagagactggtgcagtcataaaattgtcatctgtcaattgtgagataaacgtggaaagtgagtaaatatttggaacttttatagcaatttgacatttccataacattctgttttacaaaattatcagtccataaatgattgagaattgaaaacaaagtttgttctttcccagaaataatttgagacaagactcacacttttcaagacatgagacaagtgacaatttaaataagaaattcttcacttgcacctctctgattagaatagcagaatattcatactatagcaagatttggcaaatgagggaatcaaaattttctaatgcctgtaacagcataagataatttataccagatatgttaaatgtgcagaagccttccaacactattcagtctttgttaaacttcagtaagttcatcctagagagtaactctgttaatgtaacaaatgtaggaaaacccttatccatggcaaataccatactgtcatcaccatttcacctccatactacctgtaggatggtgagcaaaatgcttatctcttctggacatgatgtttcaaatgctgatggtaactaataatgctgttacagagattagatggatttagtatgcatcatatccttggaagagtatctggtatgtagcctatgcttaatacatattagctattgttcatattgtctttattattagtattactactggtgaattcttaggagaggcacaaccgttttgaggaatgaattcagaaaagcttcccataaccactcatccatttgaatttcagatagttcattctggataagatctagtacagtataaagaatttgaggggattttaattcagagtttatcccttaagctgagctaaaaaaatgagacttgaaaaaatccagacttttgaagagtttaggaaagctgttttatagaatgtcacacattagtttcattcctcatggtgaaatttgatatgggcctctccttcacatttctcgtaacatgaagttggaaatagaggcttaaacattttttaccagaacacttcatagatggtgatgtgtacttcatcttgcaatacctcagaagcagatagtatccatttcccccagtatcaccagtgccaagtttgatcacttatggtaactactggagttgtctgttataaagatccattatatacctaataggattggtcagccttgatcaatgatctttggaaatgtgtgatcatatggtatgtattttacttttttttttttttgggacaggatctctctttctgtcaccaaggctggagtgcagtggtgtgatttcggctcactgcaacctgcacctctcgggttcaagtgattctcgtgcctcagcctcccaagtagctggatacacaggtgtgcaccaccatactggctaattcttgtatttttagtagagatggggttttgccatgttggtccaggctgatcttgaactcctgcacctgcctcagcctcccaaagtgttgggattacaggtgtgagacactgcgcctggctatattttactatttggaaatcacaatgcatcttaaaattgatggcttcttgcaaccactttcaaccaggtgcctgtcatgatttagtgctagcatcaaggcaggttagttatgaagaaatagagtgtgtgtttatatactcacacagttagaaatcgacccttttaaaaattatttctttttgaaaataatgtcagttccatcagaactaatgcattgataactaaatgtctgtggttccttgtcataggtctacacctgacctctctattttgtgcacataggggattcgtaatatcactgttcagtcagtcattcaccatctagtgatcatcattctacatgattgcactttttcaaaggcataaaaagccaacagttgcactcttaataatcaactgtaacacaaagcagagtactttgggagttttaacaggatatattattggtaactggctattatgccactccctctgggtgccacatttgcctgttaaccaagaaatgtagacatggtgccttatcccaacatttctgaaattatatctcaaggaatcaccagtgcttactagtacttgacaatgaaggaggattttacagttaaagaagcttataaagtagcatctactaaatcccctcctaaggaacaagcaaaagcacctcaccagcttatcaaaagactaaagagaagtgaaaaaaaaaaaaagacggccgggcgcggtggctcatgcctgtaatcccagaactttgggaagccgaggcgggcggatcacgaggtcaggagatcaagaccatcctggctaacacggtgaaaccccgtctctactaaaaatagaaaaaattagccgggcgtgg[180 bp omitted]aaaatggttgaactttgtttaaactggtgtatggcaaacttcactgttgaaatacttattcccatgacctattatctttgtaggtgggtgaaattgcattgggaactgctgctataaccaaaagagaatttcagtcaccatgtctggttgttagctatgatggaatggcagcatcatggtctcagttatgagtgaaaatctttgttgtagctaagtagtggtgcctcctgagttttattaaatgccgtttcactatctttttctgcacttctatagtatttaatttgttcatgtgataatttattctgatagattcactgactttttcccattcctggatattccaggttagtcatagtatccttctgatgcattgcttgatttcattttgccattttatttagtatttttgcatctcatgagtgagattatataatagttttcttttttattgtatttttgtttgttttggtattgcaatagcctgttttttaatattgtatgatcctattaggttattttgtttgatccttgaccacttttctagttccatctgttgcatttttttttgtcttttaattcctacttcagacataacagatttattgagtgttagcacagttcctttaaggagccttcatagccatgtagtactagccaagatccgcataaaagacgcatcccagcatggcccctaaaatccttcattatgtgctcttaagaataatgtgttgggaagtcagaacttccttatagggctgttatgatcatacttgtacatgtcttttggagcacacgtgtacacatttctttctgtatatactgggagtggaattgctggggtgtggtcatggatacacatctgttcaactttttagtaagtttaaattcttctgaacagttttccaaacaaatgaaccgtcttatactctcaccagcagtatatcaatgttctgctttctccacatctttgaaaatacttgacatcatcagtttaaagaatattttcattactctcataggtaatatagtggcatttgattgttgataattgtggtttaattttccattttctgattgctgcctatttgtatattcttgcaatttctcttcgctccttgctccgggcattggatgcattcgatgtgtctgttttttacagagcctctgttcagtttgcaggacaacaattaacacctaggccatgacattctctctgtgtgtgtgtgtgtgtgtgtgtgtgtgtgtgtgtgtgtgtgtgtattccccaccagtgagctggttttgatgactgtgatggaatcagctttatctctgcatctccagttcccagtatgaaccatgacccttagttgtttgat[131 bp omitted]ggctaacacagtgaaaccccgtctctactaaaaattaaaaaaaaaataaataaataaataaaacccaaaaacattagccaggcgtggtggcgtgcgcctttagtcacagctactcgggaggctgaggcaggagaatggcgtgaacccaggaggcggagcttgcagtgagccaagaacgtgccactgcactccagcctggtgacagagcgagactccatctcaaaaaaaaaaaataccacattggctagaacaatgaggaagtatattgaatgatataacatgctttcagagggacagtgggctccagatatttttgattcatcagcaaaattaaatttctttttttttttttctttttctttttgagacagagtctcgctctttcacccaggccggactgcagtggcactatctcggctcactgcaagctccacctcctgggttcacgccattctcctgcctc[222 bp omitted]ttccactctgcactccccagtgttggctggcaccatgatggctggcaggtttccagatattacaaacagacatgacaacatccacagaaaataataagggagagcatctcccgtgacaggagcaaggaaacatttcccattggccagcagcgtacatctgcttttagttgctaaaatgggttatatgtaattcctgaaataatcattggtattactttaaattagccatagactctcaaaggttttagttaaataaaaaatcagactcttaagtttcattagctttttatgtatgagacataacaagtgatcctttattttaaaaagtaaaattacaaatatgtataaatttcataatacagataatttaatgtatatattaagaccacaaacataatttcacctttttgagattaatgttaatttttaaaagcagaaattctgaaatataaagtctatattgttagaacatttactaggaattttttatgatatagaatattatctgattgtttgtagatgtaggggacagggaaaatatttttggtctaaccttgttaagtattttttcttccagactcagaggagcctactcttaatttctagaattctgttagttaacctgaagactgagaaggccaagatttacaatgtggaaatgaaaccaaggtgtaattggaatttgggtgaacatatttactcaattcattttttaaaatttgagacagagtctctctctgtcacccaggctggagtacagtggtgtgatctcactgcaacctctgcctcccgggttcaagcgattctcctgcctcagcctcccgagtagctgggactacaggcgtgtaccaccgtgcccagctaatttttgtatttttagtagagacagggtttcgccacgtaggccaggctggtcttgaacacctggcctcaagtgatctgcctgcctccacctcccaaagtgctgggattacaggtgtgagccactgtacctggcctcagttcatttttacagcacacatacatagcactaaattcaaaagaaataaaaatcttatctctcaccttttctgaagctttaaaatcacccttttcagagacaactacactttccagcctcttctgtgttcttgagcagatagtccatgtaaatagcagagtacattgccttagagtagacattcaagatttgaaagtattcctttactatctcataattcagtgttagtcatataccagtgtcattatggatttcatcaataaaaattttggttcaatttattttcactatacccaagtgtttactgtggaggaagggtctgcagtgtccttggccacatttaaaaaatatggttcattccggactgtttgcccagatctctgcctggtgcacaagagatattgtggcctctaccaccatcaccactgggattctcttcacctctctcctctactgaatttcttgttttctactcattcattctggtggaaaaccccttccacttgctttctttgaagaggtgacttggaaataattcacgtggttgaaaggattttattctacccttctgtttttggtgtctccctattcttggccagcaggttcctaggcatgttcttttcatagtagatggcagaaacacaagaggctgagccaaagcatatttaaagtatctatatccattgtaatccacccaaattctgttgactagacacatggccaagcccaacaccaatggggcagggatgagctctgccaagggtggagagtaagggaagaattgtgggcaaatattctaagccaccagattcataccaacattactggcatgactgtgagtcaacacattccactgtggggggcaactgagcaataattaatgatgtcattgagaatagtttattcttcacaggcttcttgtaattcaggtctctgcccaaatgccacctgattgaacaggtctttcttgaccacccacttgactagccccacccttctgtcagtcacactctttcagattatttttaaaaatttcctcatttcaccaaacactaagtgacattctttgattttatttatgtatttatttattttattttttgagagggagtcttgctctgtcacccgtgtcggagtgtagtggcatgatcttggctcactgcaacctctgtttcccgagttcaagcaattttcctgcctcagcctcctgagtagctgagattacaagcatgtgccaccacgtccagctaatgtttgtatttttagtagaaatggggtttcactatgttgctcaggctggtctcgaactcctgacctcaagtgatcacctacctcagcctcccaaagtactgggattacaggcgtgagccaccacgcccggccaggcattctttgattttaaataatgtgtcaaagaaagtgacattatttgtccccatgttgattgtctacactcttggacataagttccacaggatcaggggatatgcttctcttgctatcattgtatctccaatatctagagaaatgtatggctcagagaagatgctcaaatatttgttgaaggaataaaagtgaaaatggattgattcatatttagactctaaatagaggtggagtactgctgcctcctttagagaataaaactcaaggctctgaatagtatgagtttctcatatttagggaaggaaaatatgtgaggactaaagtagagttaaatgcactgaggaagctaatatttataaggatgcaatttggaataatatgacttcctggatttaattgacttctggtaatttgaatgtagtgtgaaggaatcaacccttattctttgattctggaactcacaccacacaaaataatgcagaggttgagggcattgtctcagagactaaacctccaccacttactagtagtttacttaatgtcttaatctcaagtcacttaatctttagtatctgtaatagagatataacaatagcataaccatgtcgtagcactgtggagggtattatatgagtgaaaacatgcagcatggttaaggcactgcctgtaagttctgtataagggattcccacagacctccagatctggcttgccaagactataagtggcatccaaaaggcatgggcaaaagccctgagtccataccttttctgaattcttatattagttctaataatttatctgatgattttttggtgttttcttggcttactatcatattatctaaaatgttaattttatcgtgttctttttatgtattttctttctctggctttatttatatatttttttgaatagggtctttctctattgcccaggctggagtgcaggggtatgatcatagctcactgcagcctgaaactcctgggttcctttggtccttccacctcagcctcctgagtagctgggactgcaggcacaggccaccatggctggctggtttttaaactttttgtagagacagggtctccctatgttgcctggactagtctcaaactcctaggttcaagtgatcctcctgcctcagcctcccaaagtgttgggattacacgcatgagctgctatgcctggccctctttttcttgctttaaagcaggggtccccaacccccgggccacagactcatactggtctgttaggaactgggccacacagcaggaggtgagcagtaggagagcgagcaaagttcatttgtatttacagccactcctcatcactcacattactgactaaggtcccccttctgtcagatcagtggaggcattagattgccatagtagcatgaaccctattgtgaactgtgcatgcaagagttctaggttgtgcattccttatgagaatctaatgcctgatgatctgtcagtgtctcccatcacccccagatgggactgcctatttgcaggaaatcaagctcagggctcccactgattctacaaaataatgagttgtataataatttaattatatattctaatgtaacaataatagaaataaagtgcacaataaatgtaatgtgcttgagtccaagcagataagtctttccctataaaacctactccaaaatattggaagatgtgagtttcactagatgactagaaatcaacatagggaaacatcaaacatgaaaatgcaagaaaacgtaacacctccaaagaaacacaataattctttaataatagaccccaatcataaggaaatatatgaaatgccagaacaaaagttcaaaataatgattataagaaaattcaacaaggtacaagagaacacggatagataattcaacaaaatcagggcaacaatttacgatttgaatgagaaattcaacaaagagagaaacatcataaaaaagaaccaaacaaaatttagagctgaagaattcaatgaataaaataaaaaatacagtcaagtgcttcaaaaacagactaggccaagcagaagaaagaatttctgaacttgaagacaggctgtttgaaataacataggcagacaaaaaaagaaaaaagaatgaaaaaaccttacaggatttgtggcacactattcagtgaacaaatattcacattatgggcattccagaaggagaaagttgagggaaacatatttaatgaaataatagctgatttattcatagatggcagaaattaaaagaaataatagctggaaacctataaacaccatcttgaaaacatgcaaaactataaaactcactggtagagccaatgcacaagaagagaaaggaatcaaaccttatcactgcagaataccacccaagcaaaaataataagagaagaagtaaggaacaaagaatatataaaacaaccagaaaataatcaataaaataacaggagtatgccctcacctattcataataaccttgcatgtaaacagattaaattccatatttaaaagatataaactggctaaatggattaaaaaaaaaaaaaacaagacctaactatatgctgcctataagaaactcacctcacctataaagacacaaataggctaaaagtgaagagatggaaaaaggtattccatgcaaatagaaaccaaaagtgagcaggaatagctatatgtatattagacaaaacaaattttaggtcaaaagctgtaagaacagacaaagaagaacattatataataataaagggataaattaaggaagaaaatataacaattgtaagtatatatgcacccaacactggaacactcagatttataaagccaatattattagatctaaagagagagataaagcgaaatacagtaatagtttgggacttccacactctactctctgcattggagagattatctagacagaaaattaacaaagaaatattggatttcaactgcaccatagatgaaatatacctaacatatttatggaacattctgcccaatgggtgcagaatacacacttttttcatcagcataataaatacctatgtcaaaaatagaaaatttccaataaacaacctaattatgcatctcaaggatctagaaaagaagaacaagcccaattagtaggagagaaataataaaaatcagagcaaaaataaaattgagagtcaaaaatacaatagagcaatgaaacaaataattgtttttttgaaacaataaaatcagcaattagccagactaaataagaaaagagagaagactcaaataaataaaattggaaatgaaaaatgagacattacaatggataccacagaaaaaaggatcattagacaatactatgaaaaatatatgccaatacaattttaaaactagaggaaatggataaattactggacatatgcaacctactaagattgaaccaagaagaaatagaaaacctgaaaagactaatgacagataatgagattaaatcagtaataaaatgactcccaataaaaaaaagtccaagaatggatggttttaattactgaattctaccaaatctttaaagaattaataccaatttttctgaaaatatttccaagaaattgaagcagagggaactcttcctaaatcattttatgagaccagcataaccctgataccaaagtcaaataagaatgcaacaaaagaaaactacaggccaatatccttgatgaacagaaatgcaaaaacctcagcaaaatactagcaaatagaatacaatacatcaaaaagacaatacactatgatcaagtgggatttattccaggaatgcaaaaatggctcaacatatgcaaatcaataaacatgatatatcacatcaacagaatgaaagacaaaaaccatatgatcacctcaatagatgcagaaaatgcaactgataaaattcaacattccttcatgataaaaactctcaataaattaggtatagaaggaaagttcctcaacacaataaagaccatatatgacaaacccaaagctgtcatcatactgaatgcagaaaagctgaatgattttcctctaagatctggaacaaaacaaggatgcccactctcagcactcttattcaacataatactggaagtcctagttagagctattaggcaagagaaaaatagcgggcatccaaactggaaggaaggaagttaaatagttcttgtttgcagactacataattttctatatagaaaaacctaaagactctaccaaaaaactcttagaacagataaacaaattcactaaagttgcaggatacaaagtcaacatgcaaaaatcagtatcatttctacacacgaaaaacaaactagctgaaaaagaactcaaaaaggcaatctcattttctaaagctgcaaaaacaacaacaacaacaaaaacctaggaagaagcttaaccaacgaggtaaaagatctctacaaggaaaactacaaaatgctgatgaaaaaaattgaagaggatacaagtaaatgtaaaaacaccttatgctcatggattggaagaattaatattgttaaaataaccatactgccaaaaggaatctacagattcaatgaaatccctatcaaaattcccatggcattcttcacaacaacagaaaaaaatctcacaatttgtatggaaccacaaaagacctcgaatagtcaaagcaatcttgagcaaaaagaacaaagctggaggcatcataccatgaaacttcaaaatacaaaacaaagctgcagtaacccaaacagcatggtgctggcataaaaacacacatagaccaatggaacagaatagagaacccagaaattaatccatatatacacagtcaactgatttttgtcaaaggtatgaagaacactcattggagaaaggacattctctttaataaatgttgctgggaaaacggaataaccatatgcaaaagaatgaaactagatacccatctttcatgctatacaaaaataaactcaaaatggatcaaataccaaatgtaagaccccaaaccacaaaactactagaagaaaacataggggaaatgtttcaggacactggtctgggaaaaattttaatgaattttttttttttttaagtaagaccacaggcaacaaaagcaaaaataaacgaatgaaattatatcaaactaaaaaggcttctgcacagcagaggaaacaatcatcagagtgaaaagacaacctagagaattggggaaaatgtttgcaaactatttatctaacaggggattaatatccagaatatacatttcaacagcaaaaaaatttttggttaaaaaaatgggcaaattttttgaacaggcatttctcaaaagaagacacagaaatggatgacaaatatatgaaaaattcccagccttatcatcaggtaaatgcaaatcaaaaccaaaatgaagtgtcatctcatcccacttaggatggttattatcaaaatgacaaaaaaattagcaagtgctggcaaaactgtggagaaaagggaactcttatatactgttgatgggaatgtaaacttgtatggccactgtggagaacagtatgaaggctcctcaaaaaaacctacgaatagaagtaatcatatggtccagcaatcccacccagacatttatcaaaggacaggatatccgtatatccaagagacatctacatccccatatttattgcagcactatgtataatagctaagacatgaaatcaacctgggtgtccaacaacaaatgaatggataaagaaaatgtggtatatatacacagtggagtactaagccataaaaagaatgaaatcctgtcattcacagtaacatggatggaagtgtaggacattatgttaagtgaaataagccaagaacagaaagttaactgccacatgttctcattcatatgtggaaaccaaaaaagttgatctcacagaagtaaaaagtagaacagaggatactataggttgagaaggggagaatatgaacagatttgttgaaggatgaaaaaatcacagctagataggaaaaataaattctagtattctatactactgtgggatgcctatagttaacagtaatatatagtttcaaatagttagaaggaggatattgaatattcccaatacaaagaaatgaaatatatgaaatgatggctatgctaattactctgatctaatcactatgcattttatatgtatgtgtgtgtatatatatacataaacatcactatgtaccacataaatatgtacatttgtcaatttttaagtttctataagtaaaataataggtttttaaccccataaagtatttcataacaatttaattttaattgtaatcatccaaatgaatagatgcttaggtgctaattaggaaaaaattgctagaaataattttttgaagtattatatatctttagaagtatttctctacttctggaggtggagggggaagagagacatatcactaagtcagagcaagggtattgggaataccttgctctgtgtatcaagaattatctgtatactgcataaataataattcttgaatgtatgtaacaatctttaggtatatagatgctgttttaacaaatgacaaaatttttaaaaagttaaaatatattaaatctcacacacacaaacacttacagaccatacatggcaccgtttgcagttggagaaatgtaattaattgtaaagatgcagtattaaattataactgcataaaattaaccgtagaacatactgttctattataataatatcatagccacctccagttgttattgcagtggatgcaagtgttgcaagtattcacttaaaacactatgtgatactagtcatttctgtgggagcagtttatctctccagtaaattgcatattgcagtaaaaagtgatctcttgcagttctcatatatttttcatcatgtgcagtgcaatactgtaaacgatgaataacagcatggtgcccatacaaagcactgcttgtgatattcgaagtgctcccaggaagccgtgaaaagttattacattacaagaaaaagttgaattgcttgtcacgtaccatagactgaggtctgtggctgcagttgcctgccatttcagacagatgattcatcttataaacagattatgtaaatatgttattgataaatacagtatggtactgtaaatgtattttctctttatgattttctttaaaatatttttctttctcggccagcactttgggaggccgaggcaggcagatcacctgaggtcaggagttcaagaccagcctggctaacatggcaaaaccccgtctctactaaaaatacaaaaaattagctgggcgtggtggtgtctgcctgtagtcccagctactagggaggctgaggcacaaaaatcgcttaaactccagaggcagaggtttcagtgagctgagatcacgccattgcactccagcctgggtgacagagcgagactctttctcaaaaaaaatttttttttctttctctagcttcattttacgaatacagtgtgtaatacatatagcatacaaaattgtgttaattgactgtttatgttattggtaatgctcaatagtaggttattagtagaagttactaattggtggagtcaaaagttacctctcgatttctgactgtacagggggttggcactcctaacctctggactttcaagggtcaactgtagttgttatactgtatttttaaaattttgcattttttattgtcttattgctatttttttggtcctcagttggttgaatctgcagatgcacaatccacaaatacagagggcagactgtatttgctttgctagtatttacttttggttaatgtgcatgtgtgatttatgaatgatggcaatagctatgcagtggcagaaagttgggagtttatgccccataatgtgtttttgaaggcagaatactgctaggtgaaattgaacaaaacctaaatatatagagaaatataccatgttcatggattgaaatactccacattgttaagatgtttattcttcccaaattgatatgaagattcaatgcaatcctaacaaaaatcccagcaaacattttgtaaatctttccaagctaattctaaaatgcacatagaaataaaaaggtctagaattgccaagagcagtcttgaagaggaaaaactttggtttcaaagaacatctttatttctgccttcatttcgttatgtacccagtagtcattcaggagcaggttgttcagtttccatgtagttgagcggttttgagtgagattcttaatcctgagttctagtttgattgcactgtggtctgagagatagtttgttataatttctgttcttttacatttgctgaggagagctttacttccaagtatgtggtcaattttggaataggtgtggtgtggtgctgaaaaaaatgtatattctgttgatttggggtggagagttctgtagatgtctattaggtctgcttggtgcagagctgagttcaattcctgggtatccttgttgactttctgtctcgttgatctgtctaatgttgacagtggggtgttaaagtctcccattattaatgtgtgggagtctaagtctctttgtaggtcactcaggacttgctatatgaatcttggtgctcctgtattgggtgcatatatatttaggatagttagctcttcttgttgaatcaatccctttaccattttttaacggccttctttgtctcttttgatctttgttggtttaaagtctgctttatcagagactaggattgcaacccctgcctttttttgttttccatttgcttggtagatcttcctccatccttttattttgagcctatatgtgtctctgcacgtgagatgggtttcctgaatacagcacagtgatgggtcttgactctttatccaatttgccagtctgtgtcttttaattggagcatttagtccatttacatttaaagttaatattgttatgtgtgaatttgatcctgtcattatgatgttagctggttattttgctcgttagttgatgcagtttcttcctagtcttgatagtctttacattttggcatgattttgcagcggctggtaccggttgttcctttccatgtttatcgcttccttcaggagctcttttagggcaggcctggtggtgacaaaatctctcagcatttgcttgtatgtaaagtattttatttctccttcgcttatgaagcttagtttggctggatatgaaattctgggttgaaaattcttttctttaagaatgttgaatattggcccccactctcttctggtttgtagggtttctgctgagagatccgctgttagtctgatgggcttccctttgagggtaacccgacctttctctctggctgcccttaacattttttccttcatttcaactttggtgaatctgacaattatgtgtcttggagttgctcttctcgaggagtatctctgtggtgttctctgtatttcctgaatctgaacgttggcctgccttgctagattggggaagttctcctggataatatcctgcagagtgttttccaacttggttccattctccccgtcactttcaggtacaccaatcagacgtagatttggtcttttcacatagtcccatatttcttggaggctttgctcatttctttttattcttttttctctaaacttcccttctcgcttcatttcattcatttcatcttccattgctgataccctttcttccagttgatcgcatcggctcctgaggcttctgcattcttcacgtagttctcgagccttggttttcagctccatcagctcctttaagcacttctctgtattggttattctagttatacattcttttaaatttttttcaaagttttcaacttctttgcctttggtttgaatgtcctcccgtagctcagagtaatttgatcgtctgaagccttcttctctcagctcgtcaaagtcgttctccatccagctttgttccgttgctggtgaggaactgcattcctttggaggaggagaggcgctctgctttttagagtttccagtttttctgttctgttttttccccatctttgtggttttatctacttttggtctttgatgatggtcatgtacagatgggtttttggtgtggatgtcctttctgtttgttagttttccttctaacagacaggaccctcagctgcaggtctgttggaataccctgccatgtgaggtgtcagtgtgcccctgctggggggtgcctcccagttaggctgcttgggggtcaggggtcagggacccacttgaggaggcagtctgcccgttctcagatctccagctgcgtgctgggagaaccactgctctcttcaaagctgtcagacagggacattttaagtttgcagaggttactgctatctttttgtttgtctgtgccctgcccccagaggtggagcctacagatgcaggcaggcctccttgagctgtggtgggctccacccagttcgaacttcccggctgctttgtttacctaatcaagcctgggcaatggcaggcgcccctcccccagcctcgctgccgccttgcagtttgatctcagactgctgtgctagcaatcagcgagactccgtgggtgtaggaccctccgagccaggtgcgggatataatctcgtggtgcgccgtttttttaagcccgccggaaaagcgcagtattcgggtgggagtgacccgattttccaggtgccatccgtcactccgttctttgacttggaaagggaactccctgaccccttgcacttcccaagtgaggcattgcctcgccctgcttctgctcccgcacggtgcgcgcacccactgacctgcgcccactgtctggcactccctagtgggatgaacccggtacctcagatggaaatgcagaaatcaccgtcttctgcgacgctcacgctgggagcggtagaccggagctgttcctattcggccatcttcaaaactttgggatatttagcttaccttgtttcaaagcttaatataaagctatttcatagagtgtagtatttgtataaggaaagttaaatatatcagtgtaacagaagacaggctccagaaataattccaaatatatacaaccaattgatttataagagtcacctatgcaaatcaatgagggaaataattttttatcttaaaaaatctatttggagagattttataataaaaaaattcctgcaaactattcaaaaatccatcaatagaagaacagatgaataaactatggtatattcataccttgaatattactaaatagtaaaaagctataaactactaatctaaggaataacatagcagaatctcaaatttttctattgaatgaaagaattaaggaatagtagtattcataatgtatgattccatttacatgaagatcaagataaggtaaaacacattaattgtaatagaaatcagaacaacagtagccttaggagaatgaaagataagaagcaagagagaacttttaggaatgatggaaatgttctgtaagtgtcttcctgttgcagatactctgaatttttgatgagttggggatgagtccttacgtggaaacattcatggaaagtattagctctgggtttttttttttgttttattttttgtttttgacaagagctcactctgttgcccaggttggagggcagtggcaccatttcggctcactgcaacctccgcctcccaagttcaagcaattcttgtgcttcggcctcctgaggagctgggattacaggcatgcatcactgcaccaggctaatttttgtatttctagtaacgtcggggttttgccatgttggccgggccaagaactcctggcctcaagtgatccgcctgcctcagccttccaaatgctgagattacaggtgtgagccattgtgccctgccttgatgtatttatttgaatacttcaaaaagaagaagagttacagtgatactaaggaaataattattagtaattaaatggaaatacttagtactttataattaaattattattctaggttgaaaagtaagtatggacaaaatttaaaatttaaaataaatgaaggcatattacacagaattgagtggagaccagtactatggtcagaattgtaaaaaatgagcctggaagataatatactatgaatttcatgatgaatgtcaattgcaatttgctgtgagagagcaaaaaaaaaaagctgtttattacataacaaattaaattgttaaagagaaaaatattgtgaaacattttcagcaaatacatagtaaatttgatgagacgttttctcttgagaagcaaaatggaatagatgaagttagttgcctgaaattagaattaaatgtccaaccaaaatatttaaacaatttttaaacagaatctgagtttataacctttttgagctataaaatggctctgattcttgcacaaaaaagaaatgttggatatagagataagataaattattagtttggttgcaaaaatcttgttagcatattctgagaaagactaaaatgatcttataaaaagtaaaaaaaaattaagtcacctaaaaactgctcatagaatacaagatatttctaacaatatcatggatcaattaattcaaagttagcaaaagcttcaagtactcttctttagccatatatgagttgtgcaatataagataatttagcccaattgatactgtgggtacattttgtctcaaaagatccccaaataaaaaaagctgtcaattcgcagcctacaaaaccagagtcatgacatagatatttttgtcttttatatctgtcaaagaaaaatttctgttaggtatcaaaaaatatttctatcacaatagatgatacaccagctgtattaggttaaaaatctgaattccttggaattttaatgcaagagactgatgtctccctaactgctttgctctactgtataaagaatatacctatgaagtatatacatgtaaatattatgaatcacgactacttcatggaactgttaaaagaaatagaggtcaggcttggtggctgacgcctgtaatcccagcattttgggaggctgaggggggcgatcatgaggtcagcagatcaagcccatcctggctaacacggtgaaaccccgtctctactaaaactacaaaaaattagccaggtgtggtggtgggcacctgtagtcccagctactcgggaggctgaggagaatggcatgaacctgggaggcggagcttgcagtgagccgagatcgcgccactgcactccagcctaggtgatagagtgagactccgtctcaaaaaaacataacaaaacaaaacaaaaaagaaatagagaacaattaatcttatgttctttcccaatgctcatctgtttaatggtgtaagacatttacaaagatttctcgtactttgaactccagttcaagattttctttaaagaaagttttccaaatatttaataataaaggaaaaagaagacagtgattttttttctcaccagtatcacattgcatatgaataagcaaaatctgaaactccaaggaaaggaaagcttttttttcgtgacctagtgaaaataataggaacattcattgaaatgaaaacttttcactgtataagttcataataatgattttatatatttttctagcatgaatcaatatatagaggattttaacaggactgaaaagccttgtgaaaagatgcatgcaatgaagaaataggcaatcttagtaaagaaataggaactataaaagtactaaaggaaaattctagaactgaaaaatgtaatatctgaaattaaacaatttgatagataggcttagcagcagaactgaaatgacagagaaaaagaataagtgaatttgaaaacagagtaacagaagttgtccaagctgaagaacagaaaaaaaatactgaagataaataacaaagacagtgacctgtgggacagtaccaaaagatttaacgtatgagtagagtaaatgcagaaaaaatatttgaagatataatggccaagaatttctggaatttggtgaaaggcacatgtgtgcaaatttcagaggctcagagtaccccaagcagaattaacacaaagaaaaccatacctaggcacctcatactcaaacagctgaaaaccaaaagtaataagaaaatctggaaagcacccagagaaaaaggacacattacataagagaaaaaacaattcaaatgacttcttcttgtaaactatggagacttgaagaccagaagtcggtgatttatatatacatatatgaaacaatatatatctctttatgagtatatatatgtgtgtgtattctttgtgtgtgtgcatatacacacacatatattcatatatctccaaaaaactgccaacccagaattctatagccagaagaaatccttaaaaaataaaggcatttcagtaaaagaaactatgaaaattcatcaccagcagacgttcactccaagaaatgctaagttaagttcctcaaactgtagggaaatgataccagagaaaaattcagatctctggaaagaaataaacagcatgggaaatagtaaatatatgggtaaatataaaagatgaggattttcatcttaatttctttaagcaactgggtgtagcactgtgtgcctatagtcccagctactccagaggttgaggcaggaggattgcctgagctcaggagttcaaggctgtagtgtgctatataacatctgtgaatagccactgaattccagcctgggcaacatagcaataccccatctctaaaaatagaatacagaagactgttcaaatttccaacatgactttccatggattacttatttaattgcaaagaaaaaattcacccataacaatggaaggagctggtggtcaatacatgaatcaagggataaaacatagtttcacttgtaggccacctgatactttacaatattaagtacatgatactatctatgaagtagtcttttgaaaatgtttaatctgaaacccaatcaagcctctaatcataacctccaggtcacagtaaatatagaggacaaagaaacaagttaatcacacctccagaaacaataagacaaacacagcatgtgcaacactatttaggtcaaatctaaagtcttcaaaaagtctatgtcacaaaatgatgaagggtaggctcttgactaaaagagacttaataagccataatcatataaaatatatgagattagtttggttcttggcttgtgaaaaagacagtgctaaaagacattattttaaaaattggagaaatttgcaaatggagtgaatattttaagacattatagggttactgttaatttttttgtgacaatggtgtagtagacatctagaagattatctttgatcctagcagttgtatgttgccttttttttagaggtgaatgatacctaaaacattcactcaaaaaacaggaaaagtgatatatgtaatatatacatatattcatgtgtaataagtatgatatatatatatatgcatctgtgtatatacatagacataagacatgcatggtatatatgtatttgtgtgtatatatgtgttagtatacacataaaaaagagagacatcagatgtactgaaactaggtgaagggcaaacaagccttcactgcaccactgtaaacagctaccttttctgtaaggatgtaaatcttaacattttcataaacttagggaaaacttttccaagttaatatctgtcttttggctacctaactgttcatttctaatttattttaattgtagaggatgcaaaatatgtgttatctgtattataggatttgtgaaaaaatttctttaaaccactctctaattttcaacagctatcctttcattattcaataaatacacattatttattccagcattaatcttcaggggtatgaattctgaatttaaaaatttctcatttaatatattctacaggattttgtccagaataaattatatgaagtgatgatagagcattttcaaaatatcacactcatagggtcttccttctataagatttatttttagtaattctaacaattatcataaaaataatgtatttagtaagcaaatacgatgtgccagatgcctttccaagtatttatattctatattaactagtttaatcttcactatagcatcataatagtgacaacagtaaaaatgtgccatggctaaaggctttccctctcattacattaagagtctctcaccatggtgaaatctttgatgttgactaagttgatagcaatgactaaaggccttaccacattctttgcatttctgtggtttcacaccagtatgaattgtctcatgttgagtaagtcgatcactgcgattaaaggccttatcacattctttacattcatagggtttttcaccagtatgaattctcttatgttgagaaagacctgagatagaacgaaaggccttcttacattctttacatacatagggtttcaaaccagtatgaattgtctgatgataaattagttgagaattaagtctaaaggtttttccacattccttacattcatagggtttctccccagcatgaattgattgatgtgtcttaaggtctccaacacgactgaaggctttcccacattgcttacattcatatggcttcaaatcagtatgaattatctgatgttgaataagatatgaatgaagcttaaaagtcttcccacattctttacattcatgtggcttctcaccagtatgaattctctgatgctgtgtaagttgagagcctctacaaaaggcctttccacaatccttacaatcatagagtttctcactactatgaattctcttatgtttaagaaggcttgagcccttaccaaaagcctttccacattccatgcattcatgaggtttctcaccagtatgacttctttgatgttcaacaagtagatagctgcgaacaaaggccttttcacattgttcacatttatatggtttctcaccagaatgaattttcttatgttggtaaagacttgaacgatgaccaaaagcctttccacattctttacatttgtagggtttcacaccatgatgaattttctgatgcagacacatatgtcgatataatctaaacgtttccccacattccttacattcaaagggtttcaagccaacatgaattttctgatgttctgtaaggtgagaatgacgtctaaaagccttcccgcattgcttacattcatagggtttcataccagtatgaattatctgatgctgaataagctgtgaataaaacctaaaggccttctcacatccattgcattcatagggtttcaaatcagtgtggatttttcgatgtctaataaaatgctggaaaactacaaatgcttttccacattcattacattcatagggtatcacaccagtatggtctctcagatgttcagtaaggtgcaaatattttctaaagcccttcttatattccttacactcatatgatttctctcttgtgttatttctcttatgtagaggaagggatttatgttttttgaatatcatttgactaaaacatcccactttaggtctctgttgtctcccaaattcaattgtgtactgtgggtcagttctgaaaataaacctcataaggttgaaggttttatttcttttccatgtctcctgatggtacgcatttacttcataatttcttttttctgaagataacttgttgctttcagttgtgaaattaaagtctggaagaaaatgaaaaaacaaacaaatgctattttccaataataggggtagggagaggacatctatattaaaaatagtgataaactaaaaagtgtatctgttagtaataaaagagtttagaaaattctaaagtactgccatgcaatttttaaaaggcaagaagggctcagaaaattatgaaagtgcacaggaggatgtaagatttatgagtaggcaaagacaaagtcactagttctcatatttagttgcaaatcagaattaccataggagcattttacatacactatcttttagatatccactcagactgagtggatcagaatgcacaggagtatgtcctgaatatctctattcctaacattatcacattgctctctatataattgtcagtggtttggctttatcttagaatgaaaaccaaacacataaccatgaataaaaggccctgtcttatccacacaaattcatttcaagcccttgatatctgctccctatattgtaccacattgcatcttttcagctgtgagaacacaccacaaatctttcccatctcctggggtgttacatagatgttccacctttcagaaatcctcttaagtggcttctttaaataattggctaactttaagtaaattcatatttttaagtctagattccatttcccaattatttgcctttatactccttctctcaattacatatttactaaatctcatttgttttactacttattttgttaccctaaaacatagcataggtgcaaatcttctttcaactcccattgaaaaacaagtccctaccattggtaagtattacataattcattgtagaatgaaatgttgagttaaaaatgtaaactggatgaaaataaaggtcattggaaaagagagctgagtaaactaaccatttcatttctgaaaattatgtaaaaattatcaggtatctctccctgactccaatctctcactccttattaatcttttacctcacatttactttacaggtgagaaaaatgcacttccaaaatagctcagtcaagaatataagtggaaaaggctgatatgtggccattctgcaataacctgtccccttaaaaatatacatgcctctaccactggtgttcattctttcctttgcatagccatgcttttctgtttctatctcaatcaaagtaatcacgtgttgcattaatttttactgtaatgttttaaataattttttttttaaatctacaaataatgcctgtaaggttgaaggttttacttcttttcattctacacattttcaatctgttgtgtttcttcaatgcctttcccaaattctaccttctattcatttaaagccaaggtggatcattcttgaattctacagaaatgcatctcagtaatttttcaggaattgcacgaattaatatattgaaaggcttatcaaagtcaaagcaaataaacctggggatattgggaaaaataaagtaaaaaatggggcaagagtctaggaaactgagtgcctagtagtttgcaacaaagaatatattggacgtaggctgaagattgataatctgtgtgagggagcagcctttgaaatctaatatgctaaatgggtcaagtattgaaaacaagtggaattctgtgaaaaaagtataaatttaaaaagtcaaaataatacagatgttatcctctgagccaatgcaataaaggataagtagcaatatcaaacagccaaaacacttcctatttataaacagaaagtactcaacaactactcttaggtcaaagacaaaatacaaactgaaactgtagaatttcttgaagacagtgataatggagatactacatatcagaatctatggctttcagttataatgcaccaaggcaaactcaaagattaacatgcttacatctaattaaaaataaaagaattaaaatgaataaatgaagcatttcatttaaaaattagggaaaacagccaggctcaatggctcatgcctgtaatcccagcactttgggaggccgaagcaggcagattgtttgaggccaagagttcaagaccaacctggccaacaataggaaatctaaaattacaaaaattagccaggtgtggtggcacacacctatagtcctagctccttgggaagctgaggcacaagaatcatttgaacccaggaggcagaggttgcagtgagctgagattgcgccactgtactctagcctgggcgacagagtgagattctgtctcaaaaataaataaataaatataaataaaaattagggagacattaggaaaagaatgatggactgcagaaaagaaaaatataatacaagcaaaatttaaataaaacagtagaattaacacatacaaaccattatttcctttatacctaaggaataaaagataggagggaaaatccaaatataatgacaagggggaaatgaccatcaataaagaaataaagaatgttaaaaaaatcatacaactgtgctaatatatttcaaatgtacatgaaatgatgaatcttcctgaaaataaaatttatcaaaagtgacaccagctagacttactggctggcttctagcaaacagaatatgaaaagggaaaaataataactttacagtgaagaaaaatgacggacatcaccttaaacaaatttataaggttaatacctcagcaataaatcatgctgatatcatgtatttctgatacaatatgatgagaaagctacttctctggtattcttccccaaagccgataatcccagtttaatcataaaaaattcaacaaacccaaattgtccggcacttttcaaaatacctgactagtactcttcaaaaagtatcaaggccagaaaggacaaggaaagacaaagaaactgtcacaggtaggaggaaactaaaacacatgatggctaaatgcaatgtgatatcctggattgaatcacggaatagaaaaaaggacagtggaaaaactggtacactgaataaaatctatagttttgctaatagtttgcctatagttttgttaacaatgttaacttgctagtttgcataaatgtaccatgattatgtaagatgttatcattataggaacctgtggtaccacatttgtaacttgtctataactctaaaattatttcaaaatgaaagtaaaacaataacaacaaatagactccagaagagatggaaaatctaaacagaccaatttccatgaaaaaaatagaaaaaaaatttaaaatatttttccccacaaacagctggtcacaattagttagctccctgttggccaggcttcggtctctatatactatttcccattaatgtgaactagggtgccttggagaaatagctaattcctagttcagggagggaagatacaaggcgaatctggaacctcttgtactaaaatgcaaagaagcttttaaagataacagaaaataacttgtgcttttagttatgaaacattaagagggatcagatttccccttttactttatttttatttatttatttatttattttttattattatactttaagttttagggtacatgtgcacattgtgcaggttagttacatacgtatacatgtgccatgctggtgtgctgcacccactaactcgtcatctagcattaggtatatctcccaatgctatccctcccccctccccccaccccacaacagtccccagagtgtgatgttccccttcctgtgtccatgtgatctcattgttcaattcccacctatgactgagaatatgcggtgtttggttttttgttcttgcgatggtttactgagaatgatggtttccaatttcatccatgtccctacaaaggacatgaactcatcatttttatggctgcatagtattccatggtgtatatgtgccacattttcttaatccagtctatcattgttggacatttgggttggttccaagtctttgctattgtgaataatgccgcaataaacatacgtgtgcatgtgtctttatagcagcatgatttatagtcctttgggtatatacccagtaatgggatggctgggtcaaatggtatttctagttctagatccctgaggaatcgccacactgacttccacaatggttgaactagtttacagtcccaccaacagtgtaaaagtgttcctatttctccacatcctctccagcacctgttgtttcctgactttttaatgattgccattctaactggtgtgagatggtatctcattgtggttttgatttgcatttctctgatggccagtgatggtgagcattttttcatgtggttttggctgcataaatgtcttcttttgagaagtgtctgttcatgtccttcgcccactttttgatggggttgtttgtttttttcttgtaaatttgtttgagttcattgtagattctggatattagccctttgtcagatgagtaggttgcgaaaattttctcccattttgtaggttgcctgttcactctgatggaactaccctggaggctctggctgagtactgatatgaatttacatgtgagcaaactaatgaggcaaaggaaagcaccaccatataggggtaggcagaacaatacctgaaagtcaccaagggtagttaggggatagttcctgtttccaccagccaggagtggtaagttggccctaaggctctacaactacttttcccctgaaaaaactccctgattctaagtacagcaggagttaaaagaacagcgtttacaaagaggtagctgagcattatcaaactgaaaaccagcagtgacccatttaattcctggttgtattactgtcatcagcctgcattctatcagactaacagaggaaaacataaataccctctggtggaagatagcatcatctgaaacctcttcagttattttatatgcaatgcccagcatacaatcacaactactagtaacttgaagatgcattaacaaatgacaaataacaagattaaaagaaagaaacaataaagaagcagacccccagatgatacaaaaaatgaggcataaaagaattaaaaaattaactatgattaaaatgttccaagaaaacagatgaaaatttagtaataaaaggaaagcaaataaaagaatgaagatttcaacaagtatttggaagttataaaagagaattaaattgaatttctggaactgaaaaagacaatatctgacatgaaaaacccctctttagaaaacagaataagtgagctggaatacaggtcaacaggaaacattcaaactccatcatatgaaaaatagaggggaaagagaggagaaaagcagataaggacatgaaaaagttgtgggatatgctcaaaaggtctaacataggtgtaattaaagtcccagatgggaggagagaatggtcacctatcttccaaaaactgaacaaagactgccccttctgcatggaatctatcagatcactggaagccaacaggccaactgctagaactacaaaaataacagtaaaaaagagaataatcttaattcattctactactataaaaattatggaggctcttttgtggtaaagagaaaaccatggttttttatgtaggaagattagcaattaaagtatttacagacattctgaacacacatataatttaaaatttgtttttgctgatagtgtctttgcagaaaaataccagaattcaaacctctagtcatttagaaaaagaagtaattataggacagggcagaggcaggcataaaggcaagtgaagaatagtgaagattcaggtgctgaatgggggtgcccattccacctaacaaacttcaaatatgcccatttccacctaacaaactttgagaatatggagcagaaatgtagctggtttcttggcatagaccataaaatatacaacagagaaggctgatattctagagagcatattgtacatcattttgtgcagatattcttacccaatgagaccaagttagtataattctccaacatcacatctctgtacaaatccctctgatccgagtttaaatattcccactcctcctgagagaagtctatggcaacatcgctgaatgtcaatggcacctgaaatgacaaacctgtgtattatttgtaaaagtaaagaagacttttcaagatggaacattaaattgcaataaaggggcaatatgtaaaaagaagtagtctagagttacaagatgatgacatggttagataagagtaaataaattagcatgtcttaagtagagtgcccacacaatcttaaggaatcctgttggagcacacaaaattttcttagtaatattagagaaaaatccaaatatataaaaataaatgaagtcaccaaactttccaaattaaatagtatatataagcacaataccttctacgtacctaagccatataatattaataaatacaagttgttacagcttttctcttcgaggaatatgaaaaaccatgaattgataactaccccctcccccaattgtattataaaatcttttccagccaacacggaataacagggattgaatttaccttcttgtatgaaacaactgaaaatctgaacaaaatatattaaaccatggttttcaagacagaaaacattgcgcaatgatacctgaaagacaagtaacaaatgaggtgaaacctacagtcacactagtttactgtaaggagacaatttctaggctgtggcacagggagcgggaacctaagcaaagcccactggattccactgagaacaagaaaagtacaaaccaatatccatcatggacacagatgcaacgattccaaacaaagttttagcacatcaaatctaacagtatataagaaagggaactctattatgaccaaggctcaatccaagcctgtctcacatttaaaaatcaatcaaggtaatgcaccatattcacaaactacaaaagaaaaaccgtatgaacatatcaatagatgcagaaaaggcatctgacaaaagccaacatccactgctgatatccttggtgaaacaagaaaagaagggaacatccttaacccaatgaatgacatctataaaaaacccatagctaacatcacatttgatagtgaaaggctgaatgctttcctccccaaatcaggaatatagcaaggatatctactctcaccacttctattcaacattgtactagcggttctagccagtgcaactcaggcaagaagaagaaataaaaagcatctagattgaaaaagaagtaaaaatctctttattcacagataacatgattgtctatatagaaaatctaatagaatctaataaaaattcattaaaactatcaagtgagttagcaagctgagaagatacaagctcaatatgttaaacataaatggcattttaattagcaacaattggtggaaattaaaattaaaaatactgaatatcaaatgaaaaatataaaatacttaggaatcaatctaacaaaagatgacaatactaatactctcataactacaaataattactgagaaaaaacttaaaagatctaaacaaatagaaagctataatatgttcatcagtcagatgactcttacctttgcaaacagatccacagattcaacaaaatctcagtcaaaatcccagcagaggccaggtgcgatggctcacccctgtaatcccagcactttcggagggtgaggcaggcggatcacctgaggttgggagttcgagaccagcctgaccaacatggagaaaccctgtctctactaaaacatacaaaattagccaggtgtggtagcgcatgcctgtaatcccagcttctcaggaggctgaggcaagagaattgcttgaacctgggaggtggaggttgc[132 bp omitted]gaaaacacaaaggatctagaataacctagacaacattgaagaagagcacagttggaggatcaaccctactaattggaaagcttaacgtaatactacaataataaagagtatgtggtgtttgcataaacgtagacaaataagtcaatggaacagagttgagaaatagacctacacgtatctagacaactggctttaaacaagtgactaaaggcaattcagtggataaaggaccgtcttttaaaaaaatggtgtaggaacaactggatatctatatgcaaaataaattatccataccttgtaccatatgccaagattaacttaaaatggcacatggagataaacataaaacataaaactatagagcttctatgagaaaacacagtataaaaatctacataagcttggggtgaggcaaagatttcttagatacaacaccaacagtacaatccctaaagaaaaagtacaatctgtaaagaaaagaaaaagctgataaactggatttcatccagaaatggaactctcatacactgttggtgggaatgtaaaatggtattatcactttgaaaaattaaaaacttctgctcttcaaaattcagttaaaagaatgaaaaaatggccaagtatggtggcttatgcctgtaatctcagcactttgggaggctgaggtgggaggatcacttgagcccaggagtttgaggctgcggtaaaccttgataacaaaactgcactccagcttgggcaagagagcaagaccccatctctaaaaaaaaaaaaaaaaaattaaaaagaggctgggcattgtggctcatgactgtaatcccagcactttgaaaggctgaggtgggcagatcacttgaagttaggaattcaagaccagcctggccaacatggtgaaaccccatctctactaaacatacaaaaatttgctgggcatggtggcaggtgcctgtaatcctggctacttgggaggctgaggcaggagaatcgcttgaacctgggcagcagaggttgcagtgagccaagataacgccactgtactctatcctgggtgacagagtgagactccatctcaaagaaaaaaaaaagaatcaagtgacaagcaccctcttattagattcatctttcttaaggtattaaggcactattattaaaaataatattattgtataaagaattatactaatatggcatgtatgttggacacaaattccaacctcttccccatagttcaatatcatctaccacatatcattctagttgattttcctttctacaactctttatagatctgttcctgagttggaacacagtaatgcagaatgatccagaacaaccttgattccctcaggactgtcaatttctcttccactacaaaatgggaccctggaattgttttcatttctcagtgatcccttagctagatccctaatctctctctaggtaagtgataatcccatcttcactcaaacctaaatgcgtttcaaagttgagatctcatctcaaacagactgagaccactcataaccaagttttcccttatctaactgtggagataagggagctgtggagaaagtttccactcctgtagtcaaataggaccattgttcctatgccacgaaaccatgaacctgacaacggcagctcaactatttcaaggtacttcactctttcactgctctaacactgctcttgagagaagactgaacacacagaagatggatgaattatttgaaaataagtgaaaatcagttcaaaaaaggagggcaaatgaggaggacatcatccatcactggaatgggaggaatgtgaaataggttccaagagagagctttctgagataggaggtttcaggattaaaaaaatgaaaatattacatgaattaaaaaatcacaataagtcagaaaagcaaaagagacatcaactcacccgggccatggtttcagaaatgctagttctcttcaggtttcctctatcagagaagcagagttcagagaagccaaagctaggtaatcaaggcatcacctgccaaaagatacgtaactttactaaagagatgtttctaaacaataagatactgtcattttacaggtatttagttgtcacatttaaaaggttgatgatgtaccacatattagtgaggctgtagggcaaagtgcattctcatggtgtcctgtagacttgtgaaaatcaagggcattaatacaggtaagcaaatctctgcataagaacttaaccacgaaaggccatttctgagactctgtccaaaagaaataattataaaatgtgctcgaagatgtataaaagaatgtgatgatacatattagttgtaatgaaaaaagctggagaaaaatctaaagagacatagacaggtagttaattaaataaatgactgtgtattcacataatggaaaataaggtagatattaaaaactattgtgtagatcactggttctgaacaggcagtgaatctgttcttaagagaacgtttggcaatgtctggagacacatttggttgtcataatgtaggcagaggtgttaaggtatctagtggaaagagaccaggtttgctgctaaacaatgtgtgatgcacaggaaagtccctaaaacaaagaattagctagccaaatatgtcaatagtgtcaagggtgaaaaaccctgaagtagactcattaaaggaagataacgtaatccagagtctctataatatataatagattatgccaacacatgataactgttaaacacaaaaaaacaggaaaaagttactaatgagcaggagaaaaaaaaatctcaacagaaacagactcacaaagaatccagatatgggaggtagcagacaagggcttgaaaatatgattaacatgctaaagaaaagaaaagatgagcaaaatggattgcaaaatggagtaaatcaatagagtatcagatctgaaaagataatcacatgaatattttagaattacaaaattaattaagagcttattgcggtggctcatgcctgtaatcccagtactttgggatgtcaaggcgggtggatcatttgaggtcaggagtttgaaaccatcttggacaacatggtgagatcccgtcactactggaaatacaaaaattagccaggtgtggtggcatacgcctgtaatcccagctacttggaaggctgaggcagaagaattacttgaactggggaagtggaggttgcagtgagctgagatcgtgccactgcactccagcctgggtgacagagtgagactccgtctcaaaaaaagagcttattatgcaacattaagtcaaatttacaataatctttctttcaaaaaatcctctatgtctattattattattttagagatggggtctggttctgtcacccaggctgtagtgcagtggtatgagcataactcactgcagcctcaaactgctgggctcaagtgatcctcacacctcagcttcccaagtagctggaattacaggtataaggcactgcactgagcctcaaattaacaataatcttatgcagagagaaaaaaagagaacacaattgaaaagaaaaatgcaagaaacagtgaaaatgtgacactgaacatctagaagaaaataagagagaatgggacagaaaaattatttaaagaaataataaacaaaaacattccaaatctcaggaaataccttgatatacaaatcaaaaaagttgtcaaacctaatcaaaataaaatgaagaaattcacacctagagatatcatagtcaaactgctgaaaaacaacattgaaaaacataatttaaaaccacattgtttaaaaaaaaaagctgtcagctataagaaaacagtaagaaaaatggttgacttctcactagaaactatagtagcctaaagaatggaatttatatctttaaagtgctgaaagaaaaaaactgagaactctgaattttatacccggagaaaaaatttttcagaaataaaggtgaaataaatacttgttgaaacaaatgctaagataattctttatcagtagacccacaatataagaaatactaaaagaaagcattaggctaaaggaaagtaatcccagatggaagcatgaatatgcaaacaagcaatgaacagctgtagatggagtaaagacatgactgatatgactaaacaaatgaattatttaaagcaacgaaaataataatgttttatggggcttgtaatataggatggaggaatgacaataatagcaaaaatggtgagcaaggaggttaatggagttaacacattaacctctattaatgactattgaaatgcccttacactacggggactctattaaagatgcacattatattataatatcttggcagccaggagtggtggctcacacctgtaatcccaggactttgggaggctgagatgggcagatcacctgaggtcaggagtttgagaccagcctggccaacatggtgaaactccgtctctactaaaaatacaaaaattagctgggcttggtggcgtgtctgtaatcccagttacttgggagtctgaggaaggagaattgcttgaacctgggaggcgcaggttgcagtgagccgagactgtgccactgccctccaacctgggcaacagagtaagaccctgtctcaaaaaataaataaataaaacaaaagaatgtacaa[144 bp omitted]tcttctaaaaatacaaaaattagccaggcatgatggtgggtgcctgtaatcccagctactcgggaggctgaggcaggagaattgcttgaacctgggaggtggaggttgtagtgagccgagatcgagccattgcactccagcctgggcaagagcgagactccatctccaaaaaaaaaaaaaaaaaaccaaaaaacaaaaaacaaaaaacaaaaaaaactgacagaggagatgaaatggaataataaaaaaaaacttaatttatacaaaaaaatcaggaaaagagcaattaaaaatataaagaaacagaaaacatatagcaagatggcaggcttatattacagtaaatataaattatagtatattactacagtataatttatacttatactaattatagtaattatagtaaatacaaatgaactaaccattgcaattcaaaactaatattataagattaggttaaaaagaaaaataggatcaattaggctgcttacaagaaacgttctctaaatataaagacacgtgtttaaaaaaatggaaaaaatctatcaagcagtattgcgaagaaaacagacacagctatactaataacaaataaagtagattttaatgcaagaagtattgtaagtaataaagagggtcatattctgcaattcagcaagaatacaacagtagtcctatatttgtatgtacctaataacatagtttcaaaaaatataaaataaatgtcaacagaattaaaggacagacaaattttaaagttagagatttcaacactctctattggtaactactaataggaacaccaaaaaaagaaaaaaaaatccacaaagccataaaagtgtgaagaagattaaccaaattgaaccaaatgaacattataccaaactgcagactacacattctgttcaaatgattacatcacatttatcagaataacattctgggctataaagtaagtatctataaattacaaaggattaacataaaacaatgtatattttctgagcctttacaattagcttagaactcaaaaagaggcagttctcaaatgtttccaaatacagacatactgtggagatattgcaggcttggccccagaccaccatgctaaagtgaacattgcagtaaagtgaatcacatgaattttttggtttcccagtgcatagaaaagatatgtttatactgtattattcagtgtgtaatagcattatccctaaaaaatacggtgcataccttaatttaaatatacttcattgctaaaaaatgctaatggtcatctgagccttcagagagtcataatctttttgctggtggaaggtattgccttgatgttgatggctgctgactgatcagggttgctgaagggtgggatggctatgacagtttcttaaaagaagacaataatgggccaggtgcggtggctcatgcctgtaatcccagcattttgagaagctgaggtgggtggatcacaaggtcaagagatcgagacaattctagccaacatggtgaaactctgtctctactacaaatacaaacattagctgggcatggtggtacgcacctgtagtcccagctactcgctcggcaggctgaggcagaagaagcgcttgaacccagga[132 bp omitted]ttctctgtagcatgtgatgctgtttgatagcattttacccacaggggatcttttttcaaaattggggtcaatcttttccaaccctggtgctgctttatcaactaagcttgtgtactattcaaaattgtttgtttttatttcaacaacattcacagcattttcaccaggagtagattccatctcaagaaaccactttaattgctcatctgtaagaagcagctcctcatccattaaagttttatcatgagattgcagaaattcagccacatcttcaggctccatgtctaattctagttctcttgctatttttgccacatctgcagttacttcctctactcaagtcttgaacccctcaaagttatctgtgagggttggaatcaacttcttccaaactcctgttaaacattttgacctccttctatgaatcaggagtgttcttaatggcatctagaatgttaaatccattccagaagcttttcaattcactttgcctagatccattagagaaatcacaatctatggcagctagagttttatgaaatgtatttcttaaaaaatgaaacttgaaagttgaaattattccttgatccatgggctgcagggtggatgttgtgttagtaggcatgaaagcaaaattaatcttttccatacatccccaacagagctcctggatgaccaggtggaacgtcaatcggcagtaatattttgaaaggagtcttttttttcctttctgagcattgggtctcaacagtgggtttaaaatattgagtaagccatgccataaacagatgtgctgtcattcaggctttgttgtcccatttctagagcacaggcagagtagatttagcacaattcttaagggcgctagaattttcagaatagtgaatgagtatcaccttcaacttatagtcaccagctgcattagcctctaataagagagtcagcctgtcctttgaagccaggcattgacttctctctagctatgaaagtcctagatggtatcttcttccaacagaagactgttttgtctacatggaaaatcttttgtttaatgtagccaccttcatcaataatcttagctagatcttctggacaactggctgcagcgtatatatcagcatttgctgcttcaccttgcactgttatgttatggagatgacttttttccttaaacctcatgaaccaacctctgctagcatccaacctttcttctgtagcttcctcatgtctctcagacttcacaaaattgaagacagttaggtctttgctctggctttggcttaagggaattttgtggctggcttgatcttctatgtggaccactaatctttctctgtattgcagtatctccatatgactcgagaagcacttttcatttccttcaagaacttttcctttgcattcacaactaggctaactgtttggcacaagaggtcaagcttttggcccgtcttggcttttgacatgccttcctcactaagcttaatcacttctagcttttgattaaaagtgagaaacagaggactcttcctttcatttgaacacttagaggctattgtagggctactaactggcctgatttcaatattgttgtgtttcaggaaaacaaagagaggaagagagacaggaatagctggtcggtggagcagtcagaagacacataacatatattcattcagttcaccgtcttatatgggtgtggctcacggtgtcccaaagcaattacaacagtaacaccaaggaccctgatcacagatcaccataaaaataatggaaaagttttaaatattgctagaattacaaaatgtgacaaagagacacagaatgagcacatgctgttgaaaaacagagacaatatacttgctgaatgcagggttaccacaaatctcaatttgtaaaaattgcaatatttgcaaagtgcaataaagcaacatgcaataaaatgagatgtgcctgtgtaaaaggcatacttctaaatagttactggtcaaataataaatcaatggaagctagaaaatattttgagttaaatgatagtgaaagtaagatatatcaaagcttgtgagacgcaggtaaaccaatgcttatgaagatataagctttaaatatatgttttgtcaaaacagaaaggttgaaaatcagtgatatacatcaagaagcttgaaaaggaaaagcaaattaaacctatagaaagtataacataccaaaagtaaccaataacacaaaaaaccccagatatacaataaagaaaaatcaataaagccaaagctatttcattgaagagattaataagaataataaacttctagttacactgatcaagaaaaaattgccaatatcaggaatataaaagaagataacactacctattttactacatacattaaaatcagaattgtatgaacaactttataactttctaataaacttgaaaatgtagatgaaattttaaaattccttgaaaacacaatttgaactgatataagaaattgaaaatctaaatattgttttatttattaaagaaattaaatctgtattaaggatcttctcacaaaaataatgtcaggccaagaggattcagtagcaaattctcccaaacatttaagaaattaaaaatgccaatcaaactcaacttgttctagaaaatagaaaaaaacaaactatgtcataaggccagaataactgtgatatcaaaaccagatgaggatattacataaaaggaaaattacaatatatctgtttcatgaacacagacgcaagcatattaaaccaaatattagcaaagagaaaccagtaacatattgaccaagagagctttattttagaaattcaaaggccatttaatttaattttttaccataacctcaaacaagtataagtttaatttttaaaaaatcaatgtaatctttcaatgttaactaataaaggagaaaaccattcaattatttcattagaaataatccatttaacaatatacaacattaatcatgataaaaattctcagcaaaccaggactagaggggaacttctttcatctgataaaggggacctaaagaataaaaactacaactaccattgtacataaagggatcattatacataatatggaccactgtctttctgatttcaggaacaaggtaaggttgtctactcttacatgtcttttcaattttgtagtagaagacctatccaatattataaggaaaaaataaaaggtgtaaatggaaggaagtaaaatgatctttatttgcagatagtgtagattacatgattatgtacataaaaatattttttaattccacaagctttaaattaaataatttattgctgaataaagggtaaaagtataaaacaattatattaaagcaaagctactgaaaaataaaatttttaaaaccttaacagtttgtaaaaacataaaaaatgtaaaacaggaataaatttaacagatgtgcaagacctttagacaggaaacaacaaaaccttaaggaaagaaattaaagatgaattcaataaatggaaatgtattccatgttcatgaactgtaagactcaattttgagataattctctctaaatttatctactgattcaatgtactgccaacaaaatgtcagcagggcgttttgtttgttttgagaaaattaattaactcattctaaaattatagagcaatgcaaagaacctggaatagacaaagtgattttgaagaacaaagttgttcttcaacttatattaccagattatcaagatataatataaagctacaggaattaaaatggaggtgctggcacaaagattgacaaagaggaccaacggaaaagtagaaagactcctgcacatatatgggcccatgctttacagtaaaagtctgactgcagcttaagagaaggccagtgtttttaacaaacggtgccagtgcacttggatatctgtatgaaaaaaatgattttgaacttcatcccactacatacacagatataaattcaagatggatcataggtctaagtgtgaaaacaaacaataaagattctggaggaagaaacagaaaaataactttgtggtcttgggatagataaaattttcctttttttttgttttaacttttaatttccacttattttagacttagagaaaagttgcaagagtagtacagagggttctcatatacccttcattctagcgtttatcttacataaccaaaggataattatcaaaaccaggaaattaacattggtacaatacgaaaaatttgcacatcttattcaaatatgttttcccattaatgtcctttttcttttccaggatcccacacattaatctacgttgcatttagctgttatttctctttagtctcttccgatctccttagactttcttactgcattaattttcagttgctaccataaccaattaccacgaatttagcttaaaacaacataaatatataaaatctcacagtttccatggacctggagtttagctgggtgctgtcctcaggctggtctcacaggctgcaaacgaggggttacctgggctgtgttctcctctggagttcaactgggggagaattcatttccaggttcattcagattgtagggagaattcatttccctgtggccatacgactgagggcctcacctttttgctgactgttggctggaggttgccctcaggttctgcaggccacctgcagttcctttgcaagatgggcttctccaacattgccacttacttcatcaagcccacaaaagaagtccaatctgctatgagtcttatatggtataacataatcacagtagagacatctcgtcacttttttttttcatatgataggtttatttttattattttaaggaaccttcatactgttttacataatggctataccaattgatattgccatcaacagtgtacaagtgttccctttcctctacatcctcaccaacacttatctattttcttttcttttcttttttttttttgagacggagtcttgctctgtcacccaggctggagtgcagtggcgcgatctcagctcactgcaagctccgcctcccgggttcacgccattctcctgcctcagc[198 bp omitted]atcctaacaggtattgtggtaacatctcattgtggtttcatttgcatttgtctgatgtgcttttcaggtaccacttaaccatttgcgtgtcatctttggaaaaaagtctattcaagtccttgcccatttttaaattggattattggtttctttttcttcaaaattaattaattcatttttattttactttaagttctgggatacaggtgcagatgtgtaggttttttacataggtatatatgtgtcatggtggtttgctgtacctatcaatctgacatttaggttttaagccccacatgcattaggtaatttgtccagtgctctccctccccttgccccccaactccccgacaggctccagtgtgtgttgttcctttccctgtgccatgtgttctcattgttcaacccccacttatgagtgagaacatgtggtgcttggttttcagtttctgcattagtttgctgagaatgatggcttccagcttcatccatgtccttgcagaggacatgatttcattcttttttatggttgcatagtattccatggtgtatatgtgccatattttctttatccagtctatcactgatgggcatttgggttggttccaagtctgcaattgtaaatagtgctgcaataaacatacgtgtacatgtgtctttatagtagaatgatttagaatcctttgggtatatacccagtaatgggagattcctcaaggagctagaaccagaaataccatttgacccatgacttttgccatataaattaacctaatgagaggagtgacatttcctgacctttgccattttccactgattagaagcaagtcaccacctctgctcatactccaggggaggggactaaacaaggctgtggactccaggaggtgggaatcatggggccacctaacatctgcctgtcatacctatcttcatgtcctttcaatttggaagagtaccaataatttattctgtcaaatttccccccgctgggtttgtatgatgtgtttttataactgaaatgaggcatgtattcttggcagtggcacagtaatgatgctgtgtctttcacattgcatcatcatgtccaagggtgcatgatatcaatgttttattactggtgacattaaccttcatcacttggttaaagtgttttctcctgtgttttccttctgtacattactaccttcccatttgtagttaataaacatcttgggagggtaatactttaacactatgcaaatcctctttctcctcaaactttcacccactaactttagcatctcttatcttggtgtccaatgtgaggatacactgcagctcccctatgtacataagttctgctaataaacactttgaattggtcaccctggtattgctgtttctttctttggaatcccaacagccccatcctgggatggtttggggcagtccctttagggaactcccctgccactgcttttggggtgactccagctgagtgttcagcaggacaaaataaggttgtttctggtatttgactactatgaataaaacttctatgaacaccctttacaagtctttgtgtggacatatattcttgtttttcttgggtatatacctaagggaggatgtggtttacctagtttatcagactgcaatgtatataaggtccagttgctcctcaaacttgccaatacttcgtgttgtcagacattttaactttagctattctggtgcatgtgtagtggtatctcattgtgatttttatttacattttcctgataatgatgggaacaccttttcatatgatattatctattttgatatactattgggtcattcaactcttttccccattttttaatttgatttgtcattttcctattgatttctaggaatttataaatgtattttgaacacaagtcttttgtgtgtgtatacagacataaaaaggagggtggaggaggagagggagggagggaggaagggaagggagggagggagagggagagggagagggaagggagagggagagggagagggagagggagagacagagagagagagagaggaaagagttgcctgtgtcttcttattcactttcttaatcatgtcttattataaatagatgttcttaattttaatgaaggcccatctacttaggtatgtccacaataaatgggctgggttatgaaatttataagagggcttaagaaatttggctcaggatcacagctagcttctgtgtgttgtgcaacacattctgatcttccagtgtttcaggccataacctacacaacttcactagtgcctgggaatgttcaaggccttggcttgggttcaaacctgcagggaaaacatgcagctgaacaggtcacagagagatcaaggcgctctgtgaaacatagagagcgagggaaacttggggaacctacaaacctatcatcatgagaatgaataaaaaattgtggtgtggtcatataaaggaagattatataacaattgaaaaaaagccctgttgatttccaaaacaacatgggtgaattccagaagtaccagtttggatgaaaaaagagagatacaagagattccatttatatgaagttcaagaacacgcaaatcttatcttgagtgacaggagtcagaatagcacttactccttatgggagaacagtggattctaactaggacaggacacagaaaaatcctctaaagcagggcacagaaatcttctgtgtcttcatctggctggtgagtacactgatcctttcaaatacaaaaattcattggattatatatatagctaagatgtgggcaccttattgtatatgatacatgcttcaataaaaagtgatgacagaactttatttgatgataatgagtaaaaatattacattacaaactgttattctgttatggtgggtaaaataacacatatgaatatatgcatatgccttgagggatggagatatacatatatatattgtgtgtgtgtgtgtgagacagggactcactctgtcactcagcctggaatgtggtggtgcaaacacggatcactgcagcctcgacctcctgggttcaagctatgctcccgtctcaggtggtggcatggacctgtagctgggactacaggtgcatactaccagacccggctaatttatttttagtaaagatgagctctcattatgttgcccaggctggtcgcacactcctgggctcaagtgatccttctgcctcggcctcccaaagtgctgagattacaggcatgagccaccgtacccaaccaaaaagatctggagtaaaatgtttacagttgttgtttcctcactttgggtttttctgtattttctgaactactatatgagaatgtattacttttatagtaaaaaatgataatagagctaatcaatctaatattagagaatgtaataaaataagttatgaatacagtgatatttggagtacggtgaggaggccttgttttctcccaagtcctaaagtctttgagttgtctcaaattagaatatcaaggctctgagttttgaatactgatatacaacagttttccttttactggttttccctaagtcacttggataaatcctcttgtcactacactctccacctatgaggactggactccctgctccagttcaggaattgcacctaccttagaaataagccattttggttaaaaaatcaattgtttccaacatgcaggaaatatctgcatatgaaaaaagaaatgggactttggcatgctgaggcttttgaaaaattccagtacaatcctgtggcagagaggttccatacaagaaaggccaaatgaaagccacccgagggaccaagaaaatgatgcttcaaggaaaacagaatggaatgatcaatgaatctcaaagaaatccttcataaattcaaacactccagggcctctctagagggtcacattaagggataaaaaagctctagaaatcatattttgaatttaaagagttgatcataaagagtctgctcctgtagcttttcagtatcacaatcatttacaagtccgtctgaaatagtgcagtgatcagtgctccacacagtagaggatgctgccacgttctcagatgttactatctctgaaattataaagactgaagttcccatgtggcccagaggaatagaaagaagtgagctgatcactctatgaaaggagaacagcatgtagaagcaggcattctcaccattctgagctcagcaacagctgattaattaaatatgtaacagggcatccatataatgaaatattaagcaaccatttaatgctaagtttaggaagctgtttaagggaataaaaacattcaagttacattgtcagtgaagaaaattaggttacaacttttaaaaaagcaattaaaaagggggcaaagaatttgaatagacatttctccaaagatgtacaaacggccaataaacaaaggaaaaaatgctcaacaccatgagtcatcagagaaattcaaatcaaaaccacaatacccacttcacactcatgaggatgacaataataaaaagaaaggtaataacaggtgttgctaagaatgtggagaaactggaaccctcttacgctggggggaatgtaaagggatactttcgataataatctggcagttcctcaaaagagttaccatatgacccagccattccacttctaagtatatatctaagagaaatagaaacatatgtctatacaaaaacttgtacacaaatgttcacagcagcattattcataatagctaaaagtagaaacaacttaaatgtccattaactgatgaataaacaacaaaaatgtggcatattcatacaatggaatattattcagcaataaaaagaaacaaagtactgatatatgctacaacccagatggattttgaaaacgctaggctaagtgaaagaagccagtcacaaaacttcacttattatataactctattcatatgaaatgtccagaagaggtgaattcagagacagaaagtagataaatggttgtctatggctggggaaaatgcagagtgagtgctagtgggtatggaatttctttttgaggttatggaaattttctcatgttgacagtggtgatggttgcacaactctgtgaatatattaaatacattaaactgtatactttaaatgactgaattttgtggcatgtgaattatatgttaataaagctgtttaagaattgggttacgggccgggcacagtggctcatgcctgtaatcccagcactttgggaggctgaggcgggtggatccatgaggtcatgagatcgagaccagcctgaccaacatggtgaaacctcgtctctactaaaaatagaaaaattagctgggcgtggtggcatgggcctgtaatcccagctactcgggaggctgaggcaggagaattgctcgaacctgggaagcggaggttgcagtgagccgagatcgcgccactgcacaccagcctggtgacggagcgagactccgtctaaaaaaaaaaaaaaaaaaaaaaagaattgagttacaaatgtatacaattatgcaaatgtaaatatgattacatttataaaatatatgtatttatcaatatatagagaaaaacggacagacatcaataaattgaaaaaagtatggaaaacataaacccatatattaacttacttaatatttgttttatagtcctgggtttctgcctattcctaaaagtatatttcataaaattaaaactttttttaaaaaggcaactatcttacttattcctattttgatttattcttccttactgggataccaagtcatttgaggatagcaactatatctttttgtcttgagacacagttagatagatttttgaatttttaacagagcaatcttttctctgaacaagtgggaaaaaatcctccctgccttaccttttaaatatcttttgatctggaggagaaaacttagtatactctagaacaaaggtcctctaaatatagtccctgggaacttgttaccaatgcagattctctgctctacctcagacctaccgaattagaaactctggggctggggcccagcaaactgtttgaacaagccctgcaggtgattctgatgcatcctacatttgagaaccagcgctgctctaaaaactgctgctgtgttttattgaaagcttttactttattttcatcagttcccattacctgaacccaccctatgattcgtttgcctgtagaaatgtatgtcaatgtaaatcggagactctgatatttcgtatgcattactggtagtctcaaagctgcttcctattatacattcctgatagatgggtttattttacttctgaatctatcctcctaatcacagtgtcctacaagcagctgttaagacatcgtgttccatttaatgtcactttgcatttaacatcattagaataaaaactctaaggtataagatccattttctttcactgagttctcacagttcgatcatatcctgacaatgctgctatagccagaaagatgcctcttccctgtgaactcccaagacaggtcatctgaatttctctagtggcctttcacatcaactatctttcttatccctattccgatttcattttccttactggataccaagtcatttgaggatagcaactatatctttttgtcattgtatcctaacaagtacaagcacatggtaaatatctgatatttgactcaaattttgaaactagggtttatcctcagggaatggctataaaaggaagcaaagatctctgcaaaatggtgttcattatagactagtttttagtcaacaattagaaacataatagctcgcagtaggcaaaaggttaaataaattatgaagagaagggcttaagggccttgaaaggaggctgtaatggcatattcacagatacgtcactgttaggcaggacatttccaaagagaagaaagggtctcatgtctttaaaattaaagagcatcttacaagtaatgaggaaatataaactcacctggactttagctttcagatgtgtagcaaaaattctttcctctttcaggatcttttttttttttttttttttaacagaagggtagcactggaaaagagaaggcaatcatgagacagctggggtttcttggatagcacagtaacttagaaaataccctcaatgatcatacctgctcacctacttcaccgagcacaaccagatgggagtaggagagaaactggaacagtgttgaccttcccaatacaagagaggccaagatcagtgatgcctagggtggaatctgtctctaattcacagcaggttcctggggctggagctttagaaatgctatggttacaaacatagagctggctcctcggcgcttccaagggggaaatatccaggagggatgcctattcctgagaactctttatcgagtcttctcagagcctgccttgaggccgcaaccaatttcaaaaatctcgtctcaagatcaagtctgtgttttcttgctgggatccttcacgcctccatgaatctggcttctctcttttacctgctgcacatcccaagtgtctgtgaggcgatagggctgaggaatctgcagagcctagagcctggagtcacagtgacaattcacacaggtacacaacactgttcatttgtctaacgcacacacacgtacacaaccctgttcattcatctcacacacacacacacacacacacacacacacagtctctcacaggcacacagaaactcctcctctgctgctcaagcagacaggcctgaaattctactgaaactccagggatgacacgccccgttcacgccctgggtcttctggtcttcagcgcctctcatcctcaccgccggttccattccaaccagggactgtggaagcctccgctgatttctgtggagacgatctactcaccacgtaggggctacagcagctcggacaccggaaaaagatctagagctcgagggtgaccctagcgcggtgacttctgggaaatgtagtccacccggaataaccatgtccacggcgcccgccattctgtagcctatgctcggagggcacatgagcaagagcttgaccatctgtaccgttggttgacttgctctattaagggctatgatttcaggtcgtcctgcgtgtttagaggaggcgagtggaatcttgagtctcggctggagaaggcagagcacgggcatgcagacctcaaagcctcaaacctgcgtgtgagaggagaagttggcgagctccagcgtatggtccacggttggtattctaggtgcgagctgaggacaggggcttttgtttttcgcgctcccaggtagcgccagcacctatagtagctccaggagcacagaaggcgttaagtgtgcattggttttagagaaagaatgcctgtgcgttttgtgttttcactctgtgacattgtgaaattcattgtgtgagaacatggatggggttgtattccggattatggtttgtttctaagtgtgttactttggacatgaaatggtttgtttcagattttgagattatgtaaattttttaagccctctcccttcactcctactcccactctgaaatttctcatgcccaattgccattctctcacttaaaatacgagtctggctgatttgtccaaggtaaatactactatggcctacttatccattaggctgaatgggcaaagtaccgagagcccacagaaatgttttctttcaaaataagaaaatgaattttaaggtcaaagaaacttaatatcgtagtctactggcgagtgtataaattgatataatcacttgggaaaactatttggcaagatctattgaatttgaatatatgcatttgctataacctagcagttccattcttacctttaacccaaatgtaagtgtatacatattcaccaaaatacatgaatggggatgtttgtggcattgccatttttattggaattgcactcaatatatgggtacttttcaggaaaattggtattttaaacattgtgaaaaggctgggcgtggtggctcatgcctgtaatcccagcactttggggggctgaggtgggtggatcacttgaggtcaggaggtcgagaccagcctggccaacatggcaaaaccccgtctctagtaaaaatacaaaaattagccaggtgtgggggcccgtgcctgtagtcccagctacttgggaggccgaggcaggagaatcgcttgaatccaggaggtggaggttgcagtgagccgagatcgtgccactgcactccagcctgggagaaagtgtgagattctgtctccccctacaaaaaaagaaaaagaaaattgagaagggacctccaggaagatggaatagatgtacttttttctatttgtccagctaagtacaataaaaaccctgggcattagttataaaaaaagagaaaaagaacactgagtggtagagaaaaggtagactggtgctgagttcccttgattttctttgtgcctcctttgtgccagacttaaagccaaagaagctagcagtcccaatacaccaatgggcacagacaaaaaagtcccagcaaaagcctgctgtctttagccaaaagacaaggaagagggcagcctagcaagaaggaaaacttttagacaattactgccatgctctagtcaaaacaccacaggaaaaaccttcagcactatccccagcatgccagcaaagacccatgcttccactcttgcctggagagttaggactttcctccccacccctcaacccagtgctaacagtagaagccacatggagtgcagtaataaggcactcctttccctccaaattagaaaggtatcagtggaggtctagtgggaaaccggaactcccacccctgccactagtaatgaggagcccccctgtgggtatcaatggaggctgagtgggaaatctggatttctgtcaccacctaataataatgaggcaggatccacttcccctaccacagtgatgtcagaggagaacaggtgatataaactgaattgtgtactccactccctgagttcatatgttgaagtcctaactctcagtacctcaacatgtggactgtatttggagataaggtctttaaagaggtaattaaggttaaatgaggtctttggtgtgggccctaatccagtatgactggtatccttataagaagaggagatcaggacacagatacacaaagggtgtgtgaaggtagcacgtttaccagaagaacatggccatctacaagccaaagagagagacctcacaagaaacaatactgctgacaccttgatatcagacttctacccttcagaactgtaaggaaattaattggtgttgtttaagctgcccagtcggtggtactttgttaggtatgatccagagcctcagatcagaaaaccaaaaatgttcagttctaacagaaaatcacttaccacaccaagaactgggaagatctcaaactgaatgaaaaagactcaatagatgcctacactaggatgatagaaatatttgaactatttgacaagaattttaaagcatccaccttaaaaatgcttcagacaataattatgaacatgcttgaaataaattaaaatatagaatgtctcagcaaagaaatcaaagatataatggaacaccaaggaattttgactcctgagaaatttagtaaccaattaaaaactcattggatgtactcagcagcagaaaggaaagaacagaggaaagaatcaggaaactggaagacagaacagtagaaatgacccagaatgaacaacagactggataaaagaccaaaaacacaaaaatgtgtaaaactctacagaaattgacataacaattatagttaaacatagtaatactctgctgacaattgatagatgaaaaatcaataaggacagagaaaacttgaacaatattatcaaccaattaaatttaattgacattaacattctgccaaacagcagcaaattgcccaatttttccaagtacatatgtcaagataggccataacctggaccatgcaacaaatctcaaaagctttataaggattcaagttatataaaatacattctctattccacaatggaattaaattaggaatcaataacaaaaagatagcaggaactaaataactttttttttttttttttgagacagtcttgctctgtcacccaggctggagtgtagtggcacagtcttagctcactgcaacctccacctcctgagttcaagcgattttcctgcctcagcttcccaagtagctgggactacaggtgtaagctgtacaccaggctaatttttgtatttttagtagagacagggtttcgccatgttagctaggctagtctccaactccctagtgacctgcccttctgggcctcccagagtgctgggattacaggtgtgagtcaccacacccggccagcatttcagagtctataggtcaaataaaataaaataaaaaataaaaacaacatatcaaaacatataggatgtagataaaataagacttcaaggaaaatttatagcattaaatgcctatattaaaagagaagagtgtctcagtgactgatatggtttgggtttcagatgctcttctttttctcttgtttcttaagataaacactgtattcgtccatcagtgactgatatggtttggatctgtgtccccactaaatctcatgtcaaattgtaatccccagtgttgacggtagggcctggtgggaggtgaatagatcgtgggtgtggagttctcatgaatggtttagcactatccgcctttggtactgtatagtgagtgaattctcaggagatctggttgttcgaaagtacatggcacctcctcccttgctctcttcctcctgctccagccatgtgatttgtgccataagtaaaagctccttgagacctccccagaagcagaagccactgtgtttcctgtacagcctgcagcactgtgagcaactaaacctcttttctttataaattactcagtcttagggatttctttatagcagtgtgagaacagactaatatagtgacctaagcttttaccttaagaaacaagaaaaaaagaacatctgaaacccaaagtaggcagaaggaaacaaaaaaaagagagaaatccatgaaatgtgcacacctgttcatgataaaaaacacattcaacaaattagaaatggaagggaacttcttcaacataccacctataaaacacccacagccaatatcatacttaatggtgaaagacagagtactttctaagatcagggacaagacaaagatgtgcactctcaccactttttttttttttttttttttttgagacaggagtcttgccctgttgcccaggctggagtacagtggcgcgatctcagctcacggcaacctccgccttccgtgttcaagggattcccctgcctcagcctcctagtagctggaattaaaggcacctaccaccacgcccgtctaatttttgtatttttagtagagatggggtttcaccatgttgcccaggctggtcttgaactcctgacctcaagtgatctccctgcctcagtctctcaaagtgctggaattacaggcatgagccaccacgcccagccaactctcaccacttctatttgatacatgctggaggttctagccagggcaactaggcaaataaatgaaataagagacatccatatggaaatgaagaagtacaatgaagaagtaaagctatatttgcagatatgattttatatacataaagtcctaaggaaatcacaaaaaactaataagactagtaaatgagttcagcaaagttacaggaagatcaatatgcaaaaaaattgtgttcttacacactagcaatgaataatcaaaaaatgaaagtaggaaaacaattccatttacaacagaatttgaagaaaatacttaaggaataaagttaacaaatgaagaggaaagtttgtacactgaaaattataaaacatcattgaaagaaattaaagacgacctaaataaaaggaaagacatctgtggttcatggataagaaaagttaatattgttaagatgccaatacctcccaaattgacctatggattcaatgcagtccttaacaatatcctagctggctcccccctcccaaccccactgcctctagaaattgaccagctgatcctaaattcatatggagacacaagggacccaaaataaccaaaacaactttagaaaggaagaacaaagttggaggactcgcatttcccaatttcaaaagttactggaaaactacagtgtggtactggcacaagggtagacatagagatgagtggaatagatttaaaagtccagaagtaagtcttgacactgtcgattcattttcaataagggtgctacggccatttagtaggggaaagaatagtcttctcaacaaattatggtaagacaactggatatctgtctgcaaagaaagaatgaagttggaattctactttataccatacacaaaaattaactcacatcactgacctaaatcctataggagctaacactataaaactcttcaaagacaacacaggggcaaatcttcatgagcttggaataggcaatgatattttggatacaccaaaagcataagcaaaacaataaataggagtatatcaaaattcaaactttttactgcaaatgataccatcaagaaagtgacaagatacccactgaatgggagacaatatttgcccatcatacatatgacaatggacttgtatctagaatacaaaaactcttagaactcaacaataaaaaaaaaatggataatccaatttctggaagtcagtcagatttctgggatgatcactcccatcctcacaacaacaacaacaacaaaaaaaactaaagaaattaattttttctggatctgtcagataatagaggtcacaaggcaaaccaccagccttaaatctggagagacaagcaaacggagatcagcttacttggagcagaaggaccaaggtaagaccatttaggcggggaaagaatattggtaactaagtgttaccaataacactgctaattaagtattaccagctaattggtaatatttactagcagtgtaattaagtattaccagctaattggtaactaagtgttggtaactaagtgttaccaattagttgataacaagtaattagcaatgctattggtaggagcgcttaattggtaatttagagaattcattggaggctagcttcaaaaatcttccagggacgcagtcttagggggagcctcacactttcatggaatttacgtccagtaatgctactaggttctcatggtgaatttacaagaaaaatctcatgttttggaggaggacaaaagtaactattttgaaatacactgagagtgttccacataacaaaggactgctatccaagggaaatgactttatcagatacttatataactggggagaaaggcaatatgtcaactcgccttcctgtcttacctaaggggaaaacagaaagactaagaactgcgtctgaagatcacaggccagggactcaggcccactaaaagacagattaaatcatatgattgtagaacacttcccctctccccacactttaccaccatatcaataggattcttgtataacaacaggataataaaagtgagaaggctgcaagacacagattctatttttaaagttcttagggaaattcaaagacaacagggaaggaaaaagaagggacactacagaaaggtaaaactgaaacctctgacaccttcagctaaatcaaacattaaacacagcccaacacctagccagattaacataaaacctcacacttaactgaagctcccacattgcctgctatatagctgtctacagctgtgtattctcctgtcctgcacaatgtaatcacactctgcaagaagctaaagcttactggcaggcccttacttatctaggtatatccaaactctgatgaatgacggcacacagggacctaccattgccaatgacctactcttctgcatcaaggaactgcagattagatttgtccttgtcccattctattggctcctcatgtgatgcccttttggtgtaagccaatgccctacaaactagccaacttacacccattggtgccacaccacttaatttcatcctttgggtgaaatgacccctacacaaaagcctttaaaactatacttcccttcatgcttaacagttgggacctggacatgataactacccctctgtggtctccacagtgacctccacaaccacatcagcgccagtcccattgtccaacaatccatgcttcactctgcactattccttcatcatgacaccacatcctactttcttcaacttgccagataatacatgtgaaacagtaacagaacatgtcatccaagagataaaactccaacaatgctgggcctgccagcaggcgtcccaacctgggtaaccactcgtacaactgatttccacactcttggaggtatgtgatatccatactactaaccagtcgccatcctctctggtcaccctccagctcctttacttccccaggcaccctcaacctcatcaggttcttcctctgaatttttccttcacagtcccacctttcctgccctctgtcaacgattgatattatataaagccattgaaagtacaagggcctcacacgtatgcactggtgaatgcccttcccataaaaggggataccaggccacctttttgtatattataaattgggcctcatcacaatctttggtataacaggcataagtctagatcttttcagttctgtagcagacttcattcttagagctgccagccaaacaacgtcacaattcctggcagaccatatgtaccaaacagcccaagatttagaagcccttaatgagataaagctctgtagctgtcatggtagttgataaaatactgcattagactaactagtggcatctcaaggtggccctctgaagggaacctctggctgtgtgaaggtcagtaaaaacaggaaagctctccagaatcgttcagtagataacaaaccaaaacagtcaacgaagttactaagttactaaaatgtggcaagagtttctgaatccctatttcttctcctgactgcttccttctgcctggattaacattatctggcaccacattatctttcagggagctattataattgctggcctaattttattgggtcaactttgcatatttggcctctctcaaatgcaagtttatttataggaaacctaggagtttgctgtgctaacccaaacatcaggggtgaattgtgaagactggaggaaacttggtgtttgacttagtgcaagccacctataagcatctcttgcctatgtccagtctccctcacaatcctgatgaggttcacttactgctccacaagtgcatatgccctccaccacctcttttaaactgtgtgctggcaggacatccccttttataaactgcctgaacattgactattctgttttggatcttttcttggacagccctcccaccccgtaatcatctttctttgatcattccaaaggactaccgtcaggagtttgacatacaaacctaaccttggaaggagtttcgacattcaaacctaaccttggaaggagtttccccacatcatagtagaggtgctgtaataggcatatagattgggagggaaaaacatttttttttttttttgcagatgacaagattgtctacacagaaaatcccaagcaatcaatagaacagctacttaaaccaatactaagtttagcaagatcataggacacaaggtcaacataaaacaatcaactatattgaaaaagaacaattggaaattgaaatttgaaaaacagtactaatttagaaccctaaaaaaggaatatgtaggtataaatctaataaagtgtgtgcagaatctatatgttaaaactacaaattactgatgtaataagggagtcctaaataggcagatactgtgtgtatggtttagaacattctcagtattgctaaaatgtcagttgtccccaaactcatctatatattcattgcaatctcaataaaaatcccagcaaattatttttacagatgacaaagctgattctggaaattatggcaagacaaatttgatagccaaaataaaataatgagttggaagactcacagtatctggtttcaagacattatatacagatacaaaagtcaagatgtgcaatatttggcaaaatgatagacacataaatcaatgaaactgcactgaggccagaaaaagacccatacatgtatggttaatggattcacaaaggtgccatggcaatactgaaagaattggattctcatatgcaaatagtggacctcccttatataaagattcacatcttatataaatactaactcaaatatatcatagacctaaatataaagcctgaaaacataaaatttgtgataaaaaagtgggagaaaatctttgtgaccttggattaggcagagttcttatatttgaaaccaaaagcacaatccatcaaagacaaaaaaggaacttcattaaaaaaaatttcttgtgtgaaaaatactgttaatggaataaaaacacaagccacataatggtatacaatatttgcaaaacacataactgacaaagatatctatccagaacatataaagaactctcaaaaatcaataagaaacaatccaggttttaaaaaaatggacaaaagatttgaacatagttcacaaaagaaaataggcaaatggatagcaaacgagcagtggagatgctcaatggccattagggaagtgtaaattaaaaccaaaatgaaatcccgctataaccctttgaaatcctaacaacaaaataaaaatgaaaccaaaccctgacataccaattgtcagtgaagttaaggaactgggactttcatacactggtggtgggaatgtaaaatggtacagttattttagaaaagtctgtcagtttttcatagataagtatactgttaccatacaacccagcaattccactcctaatatttactaagacaatgtggacacacaaaactgtttgcaaatgttgacagcagctttcttcataatcactgaaaactgaaaacccaagtatcccaccagtgataaatggataaacaaactgtggaacatccatatgacagactactactcagcaataaaagaaatgacttctgtactgatatatgcaacaagacagatgagtctcagaagcattaagtgaaaggtgcgactccaaaggaaacatactctagaattccatttatatgacattctggaaatgatataaactatacagacagaaaatgagtcagttgacaagggctggtggtggggagaggagctgactaaacagaacaagcaagtttcagggcagggggtactagaactatagactatcttgattgtgatggtggtgttcacataacagcacttgccaaaatgcatgatagagtcagtttcactgtatataaattattccctaattaaaaaaagaatgttagcttatatgattttcatggatgccttttatctcattgaagaattttttcatcatgagtggatgctaaattttgtcaaatgttttctctgaatctactgagatgatcatacatttgatcataagaatccagatataagagtacatactaaatccataggaagctcaggaacagacctaattaatttatggtatagaaatcataatacttggcactggaggtgggattgactggaaatgggcacaagaaaactttttggtttaatagacatattgtatacattgatcttggtgatgattacatttgtcaaaattcagaaagccatgaacttgagacttgtgcatgttactgcatgcagattacacctcaataaagtactgttaacatacaaaacttctagttgctagccagaaactgatttctgaacccactaacaagctgcaaccttcagtttgataaacacttgtccacgagatctgcaaaaatgggaaaatcaggccatatgactaacttatatatcctccaagccttgcagaattcttctgagtacaattttagagaaacttctagagataaataaaaatgtcaaatattactgaatttcaaatatgacagtaatttcaaatactactgaaaaattacaacgtattaggcactgaaaaggcagagtagatttggcagtcaacaaagtccctgccctcttggatcttatattctagtggaacagaattcagcatttctatcttagtacttctgatttactccagatcagactcatccttcctgatcctcttgtctgcatgtatcagctaatggtcaatgttctgaatgcagtccatatgtctccactcttgtgaggcttctctgctgtgtggtctcccaatcacttggctgaactactgactctataaaacaaatgttttgtctatgatagctctgattattaaaatatttcagcacccatctgagatagtaaaacatattttatcgagttttcctgtgtgaatcctctgatgaaggaaagtccttgtcaccctcatcatcagcatggactcgctgatgaatgataagacttgagctccaactgaagcccttcccacactcctcacatttgtatggtttttctccggtgtgaactctttgatgggcttgaaggtatgagctccagctgaagactttcccacattcctcacatttgtatggtctctctcctgtgtggaccctctggtgggcttgaaggtaggatctctgtctgaagcgcttaccacacacatcacatcggtatggtttttctcctgtgtggactccacgatgtgccagaaaattggaggcccgacagaagcccttcccacactcctcacattgatagggtttctctccagtgtggcacctctgatgggcttgaagctgtgaacctacactgaagcccttcccacactctgcacactgatatggtttctctccagtgtgaactctctgatgcacctgaaggctggagaactgactgaaggccttaccacacctctcgcatttatagggtttctctcctgtgtggattctacagtgtacattaagatctgagctccgactgaagcccttcccacatgtaccacatttgtagggtttctctccagtgtggcctctttgatgggccagaagatttgaggcctggctgaagcccttgccacactcctcacatttatagggtttttcccctgtatggactctaaaatgaatgttaaaatctgagctacgactgaagcccttaccacatgcatcacactgatacggtttctctccagtatggcctctttgatggtccagcagatttgaggcccggcagaagcctttcccacactcctcacatttgtatggcttctctccagtgtggcttatctgatgggcctgaaggtgtgaacccacactgaaacctttcccacactcctcacacttatagggtttctctcctgtgtggattctacaatgaatattaaggtgtgagctgtaactaaagctcttgccacatgcattgcatttgtatggtttctcgccagtgtggattcgctcatgagcctgcagtcgtgaacgccaactgaagctcttcccacactcttcacacttatatggtttctttccagtgtgaactttcagatgaacttgaagatatgatctctgactgaagcccaccccacactcctcacatttatagggtttctctcccgtatgaactatcagaggagcttgacaatgtgagcttttcccaacattcctcccacactcttcatatttgtatggattctctccagtgggaactctctgatgatggggaagatgtgacctctgactaaaactcctgtaacttgcatcatttgtgtatgattttgctctactgtggactctctgatgggcttgaagacttgaaaaccgacggaaggcattatcacatttttcacatttgtagggcttctctcctgcatgagccctttggttaatttgaagatgagagctccagctgaaacttttcacacaatgttctcctttgtagggtttttcaccagtgtggactctgtgaacttgaagatgggaactctgattactgaatccctcatctttatagtgcaaatcatctcgtttttccaactggcagcctgttctttgaatatttaccacagaatcttgatacttgattaactctcttgtaatctgttgccagatctgggagcagaaaagctcttcatgaggcaggtaccttaatcctacttcttgaagagtctccatctcttttagattcttggctcctaaaaggataaagaaaatgtggagatggggcatgtgaataatgttttgttccaagatgtcaagtttataaactcgggcccatagcctaaggcttcattgaaccaggagaaggttccattgcctactgcatagacatctgaacaaagtggccctgttcaaaatgtctagtaaaactcctacacataaattttcaaaaacctttgcctgggattatttcattggaagtttattccaaggttgggagatgttgaggcactgtgctagttagaaagacacatttttcagaaaataccttatcacctaagtcagggcccccaacccctgggccgtggatcagtaccagtccgtggcctgttaggatctgggccacacagcaggaggtgagcgggaggccagtgggcattactgcctgagctctgcctcctgtcacatcaatggtgacattagattcttataggagtgcgaatcctatcgtgaactgcgcgtgcgagggatctaggttgcgtgagaatctaatcttatgagaatctaactgaggtctgatgatctgaggtagaacagtttcatttcaaaaccatccccccgaccccagtctgtggaaaaaccatcttccaacaaaccagtccctggtgccaagattggggatcactgacctacatacctaaagttcgagtgtaaacagatagtggtcctttacctcttgctaggaaatagcctccatgagaacacctgggagaagaggtttatggtaataacacacattattctaaaacctgatagcaattaaagtttccataaccaccaggggggtt[132 bp omitted]cactctgtcacccaggctggaatgcagtggcacaaacatggcttgctgcagcctcaacctcctgactcaagtgattctcctgccttatccccccaagctgctgggactacagaagcacaccatcacacctggctaatttttgtacttttttgtagagatggggtttcaccatcttgcctaggctggtctcaagctcctgagctcaagctatccacctgcctcagtctctcaaagtgttaggattatagctgtgagcccccacgcctggcccagtgatgcctctttatcactcaatatcagatagtaaattctccccatctacattacacccctggcaatttccattcacctgttttgttttgacaaagcacatattaccctctgacaaactatatatgtcccttattattttttatgtctctgttgaatggatgttgccatccatgagaacgagcattttatatcattcaccactttatcatcacccaagagctctgcctgactcaacacagtgttcaatagatgtgttgaataaaagaattcccacttgtcttctctgggagactttgagccaaattacaaaagtgaaagaactttttcaagtaaacgatgcataatgggaaagggactggaaagagcgattcttctgggaagtttaaaggtttcaccagattcagggctaagtggatggtgctgataagaaaatcatgctgatcacaaaatcatggtaagaattacttaggaaaaaaaaaaatcataaggcagaaaagtggccaggggatctagggactgattgcttctaaaatttttgttctctgatttttcctttttcaagtaggagtcaatatttagagcctcgggaataatgttttctctgaaagcagactataaaaatggatggatgtaaatatatttttctatatagatcacaccattgtttttcaaactgaaggctaggactattagtgagttggaaataaattcagttgcttgtgacaagcattaacagaaaagaaaaatattagacgtgttttgtaagcaagaaatgtatttctccgcataaattcttgtttaaggccacacacacacacctacccatatgtgaatgtttgtatttatgatataaaatgtatttcttattgtaactcatactcaaaagtttgaaacctcccagtctaaatgattaagaaaggtattaatttcttaatcaaacaaattgttcaaatagaaagttacattgtaataatggaaacttgggaaacagataaatgtgtttcctttaagttgaagcctacatagtttgtcatgtctgtatatactttgcaagttttcacttttatttttatttattttttttgagatggagtttcactcttgttgcccaggctggagtgcaatggcgcgctgtaggctcactgcaacctccacctcccaggttcaagtgattctcctacctc[223 bp omitted]tgagaatgtgtcaatttgaggagggcaatttccctattttgcccaggttataatgtttctaattgaaaatgatatgttaggcccttattacaatgcagagaaaactaaaatctaccttctttagtatatgtttatttaatggctatcttctataacatttatttgcttagtggctaattttgtagaaaataaaggcattgccatacataccatatttgaatagggactactaaaatgataagtaatattcttttctgtaactctctttggaagaggtggatggttgccacaaagaaaatttttaaagggaaagacttaaaagctattctctaaacattgttttttccttgtgtaaagtgtttttggggacctgcctaaaacgtggctatgagaacctttattctaaaaagtagttcttcaccaagtgagcaagattcactattaacagctacaggaaagccacaagggggaaatgatactcaatttgattacaactaaagctaagctttcattagatgtgagtgttatggtctcaatgtgtgtgcccttgccatttgtatgctgaaatcctaactcctaaggcattaggaaggtgattatgtcatgagggcagatctttcatgaataggattagtgcccttataaaagaggcctgagagagatttcttgccccttccctgtaaggacgcagcaaagaaggtgctgtcattggatcaggaagtgggccctcagcagacactgaatctgctggtgctttgaacatggacttcccagcccccagaaatgtcagaaataaaattccgttgtttataattcccccagtcggtagtattttgttttagcatcctgagcaaactaagtgggttaatgaatacagatcttcatatatccaaaagcacccaataaattagaattagattagatattcatcagggggaaaaaaactgttctagactatgccttcgtcacacatttttgtttgccaaccttggaatatctccaaggctaacagaaaaatgtccagcagccccagcccctcctcacctgaggagttatctctctgggttgccatcttcatcatccacagcttttcttctctctctaactgtggtaggccatctggtgtggactgatgccctgtgaaaaggcaaggacataggtttataattaatacatcagaagccaaaattactcaaaattattgtcctcatttcatcgtcttcaggacatcaaacttagtgttttccacacttctaatcatgacccattggaggaagtatatttcatgcaaagacccaagatatgcagatataagtataaattactgggaaaaaaaatgttttcatcataccccctccattgtctctcacattcttcttggcaacaggacatagtttttgctgcaatgtgcagttattgccaagtgctctgacattttctaccccattttatttcattaaaaaaaccaatggtacaattcatcaaatgtatatcaggacccactaactggagatgaccacaatttgagaaaggataaaagtgtatagttgtcatgctgtcaatttatggttcattaacaaaatacacacttttgccaggggagaaagactttaaaaattccatatctgtcttatgatggatgattagaaaactgaaaaccagttcaagagctccaaagccctgtatacccaaggacagagagacaacagagggagccaatgttcagtcagagaatgcctgtcctcacccactgagaccacattcctgaagttctccagcatcacatctcggtacagcttcctctgggcaaggtccagcagttgcagctcctcctcagagaagaccacagccacgtccttgaatgtcactgcctcctacaacatcaaacacactccacctaaatcttgcaataaaggtccactggaaaagggatagcactgagaaatgtgaaaaagatgtgtagggaaaggtgtcagattcttaagagaccatattcaactttattacagttaaacacatataaagtgtattatattttaggtttttccttttcataataaatgctgtaaagaacaactttttgcatagatattacccacctattttcttaggtaagttccaagaagtgaaaaatcacaatgtcaaagaatatgcaacttccaaattatgatgtacgacagattttcttttcaatttttccctgtcttatccttcccccaagataaagtatcattgattttccataccatagataacactgaatataaccaatttttaaaaaatcctaggcaatctgttcattaagaaacaactgggttttttggtctgtaattaactagtaagatcatattttcgtatatttactggacatctttatttttctttggtatctcacctgttactgtccttttattgatattccatttagaattttatcttataactctgtaaaatttctagtgatgattttaagtcgttttttagcatatacgttgttgttcacctacattttgctggtgttttatagctttgtgttcaggagtgtttcttaaactcaacactattgctgtcttgggcgggatagttgtctgctgtgtgggggtgtctagggcactgtagggcattttgcagcacccttagcttctacctactagatgctggtagcacccccgacctgtggtaccaggaatgtttccagatgttgccgggtggggggggggggcagtgggcggtaaagtcacccatgataaagaagcactagcatatcgtattggtttttttttttttttttttgagacagagccttgctctgttccccaggctggagtgcagtggtacgatcttagctcactgcaatctccgcctcctgggttcaagtgattcttgtgcctcagcctcccgagaagctgggaatacaggcgtgcgccactatgccaggctaatttttgtatttttagtacagatggggtttagccatgtttgtccaggctggtctcgaactcctgacctcaagttatccacctgtctcggcctcagaaactgctgggattacaggtgtgagccactgtgctcggccagcattatcatactgttttaacttttcatatgaagactgttcatccctggagccctgcacattcaggtaccctaaatgaatgacagtggtcatagagaagaagaggccactggagagtgaatcgagtaggggcagtattagctgaggcatcttccactaaccaggacaagctaggcacccacacaaaaagggccaggtccactaagtggagaattctttttctttgcctctctctcttcagtcaagtaaaaatcctggagtcttttgaaatcagttggatctttggtatcctatgtgaaactaagcaactttccacaattctacagtcttgtttctttgtaattaaaatgcacatgagaccaaggactgcctcataaagttggtttgaggaataaatacagtaagagaagtatctggtaagtcctcttgtactgctagacttttaaaattaagtacattattacttcaataaaataagttaacataagagtaaaagaatacggatcagtaagtaaacatacatagggtataactcaggcctgggtaagaaaaatctagctttcttttgtggaaatatctaataatattttctctaaaatcagtggcatcatgtcacacgatgtcatatctgaatcattgacataggaactacccaaagtaccacatatcaaaagtactttttcaatatagtgtttctataacattaaaagtaaataatagcaaaactccttcaaattgctttttggaaaaaatggttatttgtgggaaaactgtagtaacaattttcagtaaaaattctaaactacctaaacattgatgaatgaggagaaaagttatctcacatacacaccacagagtaacatcaattcaagggactataaaaatatggagcaagtaatattaattagaaaagatgtaacttgaacattttgtctatacaatgcttataaatacgcagttatgaatacatctgaggaaaagaacatggaaaatcaaaacagttgttttgtaagggaaacagtaggaaaatgagagatttttattgttactgacttttctattctatgcttatttatcaaattataaagtcataaaataaagcaacaaaaattaaacaacacaaaagtaaaaagcagcaagcatttggcacacaagaggttctcaaatgtctaccgttctccttcatcttcctaacaaagagaataaggtgtatgtaatctttccgaaatgagatgacaattattacggagaaagggaggtccaactcaccttagacttcgtcattttgtcctcctccttctggagaagtgccaagtcttaagagggaaggagaaaacatgagggaaggagaaaaaagccatgagagtttggccaaaaaaaaaaccatagctgtttttttgttttgttttgttttttttaacgtgaaatagcaacagtgttccttcctcgggctggcttgatgaacagaaactaggctggattccagatactacttgtccctttggctgtaagaccctggcagcaagtgacctgcccgaccacacagagtatgcccccaacataatttctccttgtggctctcagggtatgactgattctagggagagtagaaattgagagtaaaatacccagattaagagtatttggcccctctggagccaaatgcctagatttatggcattgctatttattcgctatgaaatccaggacaaattattaatatctctgtgcctcagttctttcatccataaaatgaagagattaacaatgagagaattaacaatctcataggattgtttacaaattaaatgagggaaaaagctcaaagaatattttcagagtaccttatttcttagctgcagaaaagcacataacataaaacctgtgctcattaatggtttctaccaataaattctttgtttttttttttttttttttttttgagagagggtcttgctctgctgcccaggctggagtgcagtggcacaatcatgactcactaaagccttgacctcctgggctcaagcgatcctcccacctcagcctcccaagtagctgggaccacaggtgtgcaccacaatgtccagctaatttttttactttttgtagagacgaggtcatgctatgttgcccgagccagtctcaaactcctgagctcaagtgatcctcctgcctcagcctcccaaagtgctgggattacaggtgtgagccaccacactcagctgatgaattctttagtagaggttttttaacctctactttaacctcgcctttaacctctgaaatacctgttattctctcttggtttcccatacttaatttgaggcttttgcaatagtatttaagattacagtggtccttcctatccatagttttgctttctgtggtttcagttacctgaagtcaactatggcccaaaaataggtgagtacagtgcagtaagatattctgagagagagagagagaccatgtttatagaacttttgttacagtattttatcattattctattttattataagttattgttgttagtctcttactgtgcctaatttataaattaagctttatcataagtatgtaggtaaaggaaaaacatagtatatttagggttcagtaatatctgaggtttaagtcattcactgggggacttggaaggtatctgctgtggataaggggggactactgtacatagatgactgctttttttgatagtaaaatatgtaacataaaatttaccattttaaccattttttaagtggttacattcagtaagtacatttacattgttgtgcagccatcaccactatccatcatcagaattttttatgtacccattaagtaataattccccattccccctcccagcccctgataaccacgttatctctatgaatttgactatatggactggtttctaaaaggtataagaccttgcaaaatttggctgtgtagagtggctcatgcctgtaatcctagcactctgggaggccaaagtgggaggactgcttgaggccaagagttcaagaccaacctggccaacagagtgatctctaaagagaaaaaaaaaaaatctaaaaaaaaaaaaaaagaccttgcaaaatttactttaacagtagggccttaaaaagactatcatagagacagagaaaatttaataaaaaatcatgactctgcaagatttatgcaactataaattagataatgtcactgaaattaacaagctataggaagcacaataataacaacaaaaatggtgatatttaactaaatacatattagggaccttatgaagaacttggcacatgatgtttcattaaggtacttcacacatacctgtgaagaagctactgttgtatcagttgtgtgaccttggtccaaacacctaaacttctgtgcctatgctcagctataagaagggaaatgaaaacaggatgttaatcataggattactgtgaggaatcaatgagtgaatttatgcaatgcccttggcatagtacctggcattttagggagttctcaacagatgataatgacgacaattgtatccatttaacaggcgaggaagctgaggcttggtgaggtcaagaggcaggaacagtacctgaatccagctttcataccagagccagtattctaaatcttgtctctctgttgcttctaaagacaaaaataagcagatgggagtctaagatctcatggaaggagaaatgagggctccagagttaggggtaaaagacagacacagaaatggagattggactctgaagccaagggagctgcttgagggagtagagaacagagttgtgaacagtctagactccagaaccagcccaccagtactggaatacaggcatgtccaacttgctagtactttgtgctctaatgtctaatctataaactggatgtaataataatacctacttcataggaaggtcagtgaaagtgactaagtatacacaaaacatgtggaacagtttctggcagcttaaacaatcaatagaagttacacataaacccatgcagatgctttacatgaaacagtcagggagcccctcccttgctgctgtggaccaatgtctgtgtcccctcaaaattcttatgttgaagccctaatgtgatgttattgggaggtggggcctttaggaggtaattaggtcatgagggtgaagcctccataatgggattgctttccttgtaagaaaagcaagtaacctagctctttctctcttcctcccaggaagatacaagacaacagcttctgcgaaccagtaagagtggcctcattagacattggatttgccagtgacttgatcatggacttcccagtctccaggactgtgagttataaaggtttgttgtttaagccacccagcctatggtattgtttgttatagcagcacaaatggactaaggcactcacggagtctgcagcttcacatggcttgatgatggggaaacatgggctggattccagattccacttgacccttcagcagagagcctctgcacagtgaaaaatggagttcttgtagctctcagggtatgattctgattctatggagggtggaaacgagtaaaatacccagattaaaagcttagtattagttaattactgcttgatttattagtaaattattcttagttctcttacttcagatagaagaacccttactattgaaaagggaaacataaaaccttccaatcttagaagaaatacttatttatttatttttctgaaatggagtcttgcgctgtggcccaggctggagtgcagtggaatgatctcagcttactgcaacctcagccttccgggttcaaaagattatcctgcctcagcctccccagtagctggattatgggcacccgccaccattcctggctaattttttttgtttcttttgtttttttagtacagatgaggtttcactattttggccaggctggtctcgacctcctgacctcaagtgatccacccgccttggcctcccaaagtgctgggattataggcgtaagccaccacacccagcctgaaatactcttttagaatttgtaattcactttgttctaactctatatttgcccagcaacctctgctcagtaagaatgttttgcaggggatatatttccatcgcctcgggaaaaaaaagagataatagcaaatcaaccatctgtcttgtgatgaatgtttattcagctttatatcccaagtacctaaaacagttcctgtacaaagtaattgcccagcagaaatgactgaacccaccatcagacatggagaggcatataggaagactagactagttggtctaagtctccctgagactgactccagttgggaagatttggagagcaagggttttatttccaaatttttcctctaggtctttcaccatatttgctgtccttgggcaagatcagagtcatctttggaaggaaaagcatctctggattttgttaaataccatcttaggaaagtactctctgctcttcaaagtcagcgacgacatgagtcactgttacagaacccacagaatgtgtcccttaaaatactgagaatgaacactattttactgcctgcataattagcactagacaggtgaatttattactacttcattaaatagatgagtttattaactcagtgaagacttgtgggaaccttactaaaagagatgcaattccccagcctcaagatgctcacagtctagtgatgaggaagctggcaattccactatacatggctaaatgccagagtagtgcacagcatcctttagcggcatgaggaatgggctcataagcccacagtggaatgcaggggttctacacaaacgtagcttaatctgagccctggagggtgactgagctctattagccagagaatccaaatcactataaaactcccagagaacaaatgtcatgatgtgaagacaaataacaggcagaaagagatgggcaggaaggcagaattcaaaccatgatgacgttcaagtcacaaaattatctgcaagtcagcaggagaacactgaaggacttctggaaaggagagtaaaaagattcctttcatgttagaaacagattaccctctcaaacgggaggaggcttgagggggaggaggctagggccagagagactattaggagagccacactaagaaactctttcttctttattcaaatgtcaccacctcagagtctctctctagccatcctgtagataatttcggtctcctaactgcaccccaacacttcctatccctcatctctgcttacttcttttctctaagcccttattcctctctaacatccttctaggtatttacttacttatattcattacacttgtctaatgtggagtttcgttacctgctccatccccaacacctactaagttgctacaagcatttggaaggaacccaaagatttgcagaatgactactttaatgactcagtgaatagttgatagatacaccatgtggatcagggcctcattatttatcacctgaaccattcattcaacatatgattgttgaagggtctactctgtgccagccaagggtcctagatgtgaaatatacagcagtgaacaaagaccttgatctcacaaagatgatattataatgggctacgagggcatagcaaacccccaatatatagcgagagacacttttaagaacaatagggcagggtaaagaaataaagagatgaaaggaggggctgtcacagaataagtttttgtcatgaaagatttctcttatatttgaacagagacctcaaatataggaagagaaagccatgtagagatctgatatctgaaggcatgtaattcagccctgaagaacatagaaaatttttttttgttaaaaagccataggtctggtatttagcaaagacatggaatcaacctaaatgcccgtcgatagcagtctggataaagaaaatgtggtgcatatacaccatggaatactaggcggccataaaaaagatgtcctggctgggcgcggtggctcatgcctgtaatcccagcactttgggagagtgaggcaggcggatcacctgaggttaggagttcgagaacagcctaaccaacatggagaaaccctgtctctacttaaaaaaaaaaatacaaaattagccaggcatgatggcgaatgcctgtaatcccagctactcaggaggatgaggcaggagaattgcttgaacctgggaggtcaagcttgtggtgagccaagatcgcaccattgcactccagtctgggcaacaagagcgaaactctgtctcaaaaaaaaaaaaaaaaaaaagatgtcctttgcaggaagatggatggagctggaggacattattcttagtaaactaatacaggaacagaaaaccaaataccgcatgttctaactcatcagtgggagctaaatgatgagaatacatggacacacagaggggaacaacagacactggggtctccatcagagggtggagggtgggaggagggagaggaccagaaaaaataactcatgggtactaggcttaatacctgggtgacaaaataatctgtacaacaaacccccatgacacaagtttacctgtataacaaacctgcacgtgtacttctgcagttacagaagatcaaggatgggactaagaacctatttctaccaatatcccaggtgatgctaatgctgctggtccctaaattacaatttgatagcatcagttaaaacagctctctagatattttcagacagactaacacttgaggttttcacctccaatttttctactaaccccaatatactatcctattgcctaagggcaaaaagaactaaagaaggtaaaaacaaactgcaagcttctctttctctctgatactaacaaacaggaatgaaggtttgttaggatcaggagtgccaagatcaactctatgctcctaacattaaccacgaaaaaacccaggccactcataaaatactccctataatgacagcaactgacatttagagcaactgactggctgcctaccaaggcactgtttacataaattcttcacatgtagtatctcatttgattttcataacgatgatagagattgagaaaataattatgcccattttacagacaaggaaatagaggcacacagaagtaacttgttcatgtttaacaagtggtcaacagaaaagtcaggattttcacccagtgccttatctactagaacactggctgcgccaggcaatgaacccaggcaatctgacacctgtgcccatgttcttaaccgctcgacagtggttctcaaaccctggtatgcatccatatcaaaaggcctgaggttccatgtgctgccttgatacctttgagactcacagggccctgaaggcctagccatgagctcccggctctctccagatatgccctctcagtgggaaaggatccctgcccgcctagttcctcgtgtgttaaccatgttttatgtactggctatttgatatctgctattcctaatctctccctaagtctgctgaatcacagggccagactaacaaccaaaattatgtgcatcttccctgcaagcagctttcaccggtgggagaaagacatattacaaaagcataggccccagttcctttctctgtctgcttcctgacccttgcctgtagtgggcttcatgtggtctggtgtggtgtgatgtaccagtggaactctaagtattaaaatactattcattggcattaatctctccatgttgtcactcagccgcttttataaaattaagacttaggcacaattcatcctatttagccagaccacctgtaccccaccaggtcctccacataacaggttttgcctccctgccagcctgtagaattatccaaatggtcaattaaatcttcttgcaggaaccaagggtcaccctgctaccctcctgtcactacaaaatcaacctaccatggcccctgttggttcaatctattctcaagtgcaagtcccctgggctgtgaatatgtgactaataaactgctaccaacctcttctgcataggctgactgtagggtttgtgtgttcagccacctcctgccagttcaagtgatgtcttagtccatttttgctgctataacaaaataccacagttataaagaacagaaatttctcacagttctgaaggatgggaagtctaagatcaaggctccagcaggttgtgggtctggtaagggcctttttgctgtgttctcacgtggcagaagggtaggggaaaagggggatggaggaatgctgtgtcttcatagtcttcatatggcagaagaacaagggaggtgaactctctctctgaagcctcttttataagagcattaactccttcatgccctcatgacttaatcacttcccaaaggcctcacctcttaataacaccacaatggggattaagtttcaatgtttgggggacactcagacagcagcaggtgggggaatccctccttcaccaatggggtgaataggtgaccagaacccccgaattactaataaagaacacagaagttcaagctcatagaagtagtgtagggcctgggtcttatgattctgatgtgaccacagttcaagaaccactgcattattctacactgcctcttaaagagttgacggaactgtccaagggcacccaggaaaccaggggcatggctctgcctggcactcaggcctactgattatcagctccctgctcctctccagtataagatgcccctagagctctctataagaggaaagggctgcagaatgactggtaatgcctctggaggcaaattctcagaatgaaaggggaggcttcccttagatcagtgctgtccaacagaaatataatgcaggcaagctattcgtgtaatttaaatttttctcatagctacactgaaaaaggtaagatgaagcaagtgaacttaatttcaacaatatattttctttaacccaacatatccaaagtattatcccctcaacttgtaatcagtataagaattattgagggattttactttctttttttcatactagatctttgaaatctgttgtgccttaccattataacatatctcaattcagactagttacgtttcaggtgctcaataatcacatgcggctaatggctacactattggatagtgcaggtttagacctttttattaaggcaatatagactatataatcatctcacagggacttgctaagttcaaaagacagcaaattagttgtaggtttcaacaatcactatcatagaaactatgcacatttgtttaaatatgtaacagaattaaagtatccatagaaaaagtggaaagtggggaagaaaagaatacttaaaaatatacctttgaggctgggcacggtggctcacgcatgtaatcccagcactttgggaggcccaggcgggtggatcacgaggtcaggaattcaagaccagcctagccaagatggtgaaaccccgtctctattaaaaatacaaaaaaattagctgggtgtggtggcgggtgcctgtaatcccagctactcgggaggctgaggcagagaattgcttgaccctgggaggcagaggttgcagtgagctgagatcgtaccattgcattccagcctgggcaacagagtaagactctgtctcaaaaaaaaaaaatgtatacatatatatatatacctttgctccttcaataacttgttgcatttttcaacttatctgtagaagatgaaggccagctttagtctataatacacagaggacttactacatgcgaggcactatttcaaacatgttacctatctcttttagtcttcacagaaactttacgaggtagttattaatatcatccctacttaacgggtaagaaaactgaggcacagaaaggtcaagtaacttgcccaaggttattcagtcactgagtgttccaacctagctgctgaggtttgattctggctctgccccgctgattgtgccaccagttcatctgtacagttaacttgtgtgtgtttgttttttcatctttaaaatcagaataaaatagaactgtcataaagaacaaataagctagtgcatggaaagcactagaaattctccaagtcataagaaacacccaacaaatgtcagcagtcctcatcagaatctccatgtgataaatattaaacctggccaggcatggtggctcatgcctataatcccagcactttgagaggcggaggcgggcagatcacttgaggtcaggagttcaagactaacctgaccaacatgccaaaaccccgtctctactaaaaatacaaaaattagctgggcatggtggtgcacgcctgtaatcccagctactggggaggctgaggcaggagaattgctgaaacccaggaggcggaggttgcagtgagccaagatcgcgccactgcactccagcctgggtgacagagcaagactttgtctcaaaaaacaaacaaaccaaaaaacccaaaaaactgaaccttaatagtggtctgatttgtctttaagggagtttgttttagatcttgacaatattatccacaattgttcatcaacttttgaataccctgaaaaagttgatggattctacagcccaccaaacgtgagataacagacaaggactgtggataatccttctattttgttctctaattgcaagctgtagcacccaaaatccagatgcctgttggagagctacatgaatcacttactcactgaataactcctctttgcaaacctcttgctgggtactcttgagaagaatatgataatgtccatgaaacagaggtccctgaagtctaatgggagagagataggaaaccaagagttatatgccagtggcaagtgcaactccaaaaaagcaaagaaaatcaatcatctttcttttcctaattgcaactctttctagctttctcacataagtagcattctcctagctgccaggagtgaaaaacctcagagttactgttaatatctattatgggctgaattgtgtgtgcctctctcaaaacgttaaagtcctaacgctcggtatctcagaaataactgtctttggaaatagggcctttaaagaggtgatgaagttgacttacagcaagggagctcacgcacacagaggggagaggccttacaagccaccaaaactggtgacaccttgattttggacttttagcctccagaactgtaacaaatacatttctgtataatccagccaatttgtagtattttcttatggcagccctggcaaatgaatataattgcccctcccttggccttcatatataaacgattagtgaggcctagcatggtggctcacacctggaatcccaatactttgggaggctgaggtgggcggatcacttgaggtcgagtttgagaccagcctggccaacatggagaaacccagtctttactataaacacaaaaattagcagggcgtggtgacgggcacctgtaaagccagaggcaggagaattgcttgaacccaggaggcagaggttgcagtgagctgagatcgtaccactgcactccagcctgggcaacagagcaagattccatctcaaaaaaaacaaaaaacaaaaaacacaattaatgataattattagtttttaagccttactgactcatcatctgggtttgttttaaaatactcaagggaaaaaaagttggtgggagaggcaataagattagcaagaatggaagcagggtgactgtacataagagttcattatatttgggtatgtttggatatttccatagtaaaaaataagggaataacaacccactatgaatagtgtgataacaatttcataaaacacagacaaaaacacattaaaaactgctaaacagaaatgcattaaaatgttaataattatctatatcctagtattaaggaaatttgtaatattttatatttctgtattttctacatcctgtacagagaacgtgcatctctatgatcaaaatatgaactactaatattgcttaaaattaaatgagaattctttcaaaattttctaaagtctaaactcaaccttgctttcaaaatcttctacagtaaaattccaacctccctccccaacttgatctcaaatggctcctctgcagccagtttcctatgattatttatatggatcatttatctattttatttcctaattctaaattgggatttcaaactgtgagaccaagggtattcagatgtaaggaacccaagtctaggacacaaatcccactgttcttactagcactgtgatataggaaagtaaattaggctctctccatttcctcatctgtataattggtgtaataacagtacccatatcacaatacccacatcacctttgtaaggtgaacagaacccacaacacaaggcctttgtgaaggttcagtgtgttagtttttataaagccctcagagtgatactcagcacccaatgtttaactagtgtgactaatattcatgtcacattttctccaattatacaataacggaacacttctgtagcagaaacatttgcaaggaatgaaataccttctcgcactcggaacagaagaggaaggtgaatgctaggtcctgtcacagtggggctctgctgccagaagccaggatgctctccttcctcctctcccgcagcattctttcagaagtcagggcaggggaaggaaaggaggctgggagattgcacgatcttgtctgagatcctggaaaatccacagaggataactccagacgccacctgttgagtgatgcactctttcttaaaaaacgggtcaggcatagtccaagaacagcctcctttcctgcaggaatcagaaagaagagccaggcgcttgctgaaaaatgaatattttttattatgatagttttaatattaacggccgacatgttgccacattcctgtactattccatacacattttacttgtactatattactaattgtcaaaacaaatatataaggttaatatttccttttgcagaagaggaaactaagaccagaaactaagcaccgaaagattaagttctcacccaacgttacaccgctaggaagctacagagctgtgggaggtgggggaaggcgggtcgggccgctgagagcccaggagatcctcagacgcctccccattcaggtccacttccaaccaggggactcccgaaccgccccgaacgcagcagctccggatacagtaaggcaatcagctgcccagccattcaactccgccctccgctgctcgccgcagcgtcttttcctgctgaccgaagtgcgagccctgctgatcctacgaccaaaccataaaagttaaaacaggtcgcggggtcccaggactcactcacttccacgagaggaatgaaggccgcgctctcaacctcttgccgcggaagtgcccgggagagcagggagctctggaactacatttcccagcatccccgggaggaacggaagccgctgccccgccccctgggcggaagtgcgggcttcgactcccacggccgaatcttatttctcagaatccccaaggggagcgggcttcgtgttctcgtcctcaaatagtcgaagtaccaccgaacccactgagcactggggtataggttcctatttccccaggggagcaaataacaaagccgcgctttcccagagctgaagtgcccccaaaagtctggaccacacgtcccagaatcctctgtagggctgagcttcccgccagcctgcaattttccttttgaattagcggggggagtctaagtcattgcttgtagagctcagcctgctttttccttttgccattgttcccttttatacgtgacagaagttgcgaatatgaaaaaaaaaaaggaaaatacaaaggaatgctatgtgtgagctaaaaacagaggtaataaaagaggtggccagagccgcccagagcaacaagccttttataatatgggtatggattcatctgtgattaaaaatgctcaaaaaaggagatgcaatcatccagcaggacatgaaacaaaagcagcaaaattctccacttttcttgcgcttagttttctttcattcgcaggatactgaagaaagtattatagtattgaataggctctatcctatataaaatcttgaaaacattcagttcagattaaggaatcacatcacttcttgctctcagaatcaggaatctgtaaaggtgtcttatgatttgccaaagtgtctatgaatattcagtaaggagagggaggtgaagtgagggattaagacatgaagtgcaaaaaatacagaaagctatactattcacttttctcctaggtagaaactaaatatttttccaagtttattatgaaagggtaaagaagaaaaaatggaagttgactacataggagtagctgtaaacatctgaacaatgttcaatttaggctgaggcaggagaccagcagggcgtgattccaagatcagataagaaacctgctgaaaccagcaagtgatggaaagcaacctgtaagttccctttgctacctatcagtataagacactcccaccagcgccgtgacggtttataaatgccatggcaacacctggaagttaccaaccccttttctagagatttccgagtaactcaccccttaatttgcatgtaatgaaaagttggtataaatatacccagccaacagcccatatgctgctactctgggcacactgcctgtgggctagtcttggtctgcaaggaacagtcactgagcttttaacactgttgattcgataaacctgctttcttccgctgctggcttgctgttgaattctttcctgagcaaagccaagaaactgccctgcatcaatgccatttcaaaatctggataagtactctctctactttagtaagaggaagagagaaatgtaatcacccaatggactcatcttgcccactgcccagagagagccaatttatcaagacaggaattgcaatagagaaagagtttaatacacgtagagctggctaaatgggagaccagggtgaagactgaactctgccgttttttcttttcttactcaaattcctatctaagggtctggggagtcaagccctccaaaccataaagtctcatgagaggggttttaatttaaccctatataatgtgacttactttccaacctgtcataacacctcatgacggataagaaaggaaatcaaaatacttcaaccccaaatatgtttcattgccctatcatgaaatagccctgcaaagttgtcctttgtggagaaaaatctacattctgtagagaatctcctttcctttttccaggccattttttctgatccaggagagaatcaactaagagtctgacacttttttttttttttaagagttttgctcttgtcatccaggctggagtgcaattgtgcaatcttagctcaccacaacccccgcgtcctgggttcaagcgattctcctgcttcagcctcccaagtagctgggattacaggcatgcaccacaatgcccggctaattttgtatttttaacagagccagggtttctccatgttggtcaggctggtctcgaactcccaacctcaggtgacctgcctgcctcggcctcccaaaatactgggattacagccgtgagccaccgtgcctgggctacctttttaagtctgatgagaaaaatctacgatctcttatttctgaagactgatacctggaagcttcatctgcgtaataagaaccttggtctccacaatctcttatcctaacccagacatttcctttctattgattccaggactttagataaactctttcaaccaattgccaatcagaaaatctttgaatctgcctataacctggaagccccacacacttcacatacccctaccccccaccctgccctccactcccaaccccctctgcttccagttgtcacacctttctggactaaaccaacgtatgtcttgcatatattgcttgatgtcttatgtcccactgaaatgtctaaagcctagctgtggcctgaccaccttgggcatatgttctcagggtcttctgagggctgtgtcctgggccatggacgcttgcatttggctcagaataatctcttcaaatattttacagagtttgagtcttttcattgacagaagttttactgttactgaaatcagcctccctgaaaatttggaggctggggtttttaaaagataagtttggtgggcagggggctagggaatgggtgtgtttattggttggggatgcaattggttggggatgcaatcatggggtgtggacctcttctgggtggatgtcacatgactggtagagtcaagagttgtgggtctgggtggggtcgtctggtcatcaaaaatgcaaaagcctgaaaagacatagcaaaaggccaatcttaggttctgcaatagcgatgttatttatagggataattggggaagttgcaaatttgtgacctccagaataatgattggtaattatttatccctacatcttagcagaattcgggtctctctcataatcctaaacttgtggccttttattagtgctcttgtgagcaaaggctgctcctttcccaaacaatgcaaatctaaagacgactaccctgaacatgtttctcctataagtgtgtctatatgagatttaaatatgttactcaaattcagatttgagaaaatagccttacttaatccttggatgtcattggacattttacaaactcaatttcttttaacattattactactagaggtagtggtactgctaatgttttaaaatcaactttattaagtataatttctattaaaacataccccttttaaagtataaagttcagtacattcgatgaacgtgtacacttgtgtaaagccaccacactcaagatgcatatatttacctcacaccccaaaaagctctcgttagccctgctatgattgttctatcatgtccccagccccaagcactaatctgctttctgttatgaaaaattagttgttttcctgccgaagaatctcatacaaatgaaatcatataacatgtactctgatgtgtgaagcttttttgacacagcatttttttttttttagttggagtctcgctctgtcacccaggctggagtgcagtggcgccatctcggctcactgcaagctccgcctcccgggttcacgcaattctcctgcctcagctgcctgagtagctgggactacaggcgcccactaccacgtccggctaattttttgtatttttaatagcgacggggtttcaccgtgttaggtaggatggtctcagtctcctgacctcgtgatctgcctgcctcagcctcccaaagtgctgggattacaggcatgagccactgcacccagccgacacagcatgtttttaaaattcattcgggttgtactatttgttcttactgttgagtactcttcaatgatacggatatatcacaacttattaatccatttatttcttgataaacatttggaatgctttcaattttttgctactatgagcaaagctgatgtggacatttcacaacaacgatttgtgtaaacatatgtttttacttctgtagtttagattcctaatagtgaaagtgctggcttacattatattttatagcatcatgaaagcataaatgatgtgcagtacactgcccataaagtatataatttgatgagacttaacatatgtacacacttaagaaaccatgccacaatcaaggtaatggacatatccatcacactcaaaacttcccttgtgccactctgtaatttttttataggcttaactttatcagaaattgtcaaattgttttccaaaagcgttgtaatttttatatttccatcaaaatgtatgaagattccagcatctccaatcttcaccaacacttggtgttgtcagactttttaagtcattctgtgggtgtgtagtgcttacggtggtttttgtttgcattttacaggtgaccaaatattcatcacattttcatgtgctttttggccatttatgtattttgttaagtgtctgcttaaatcttgagcccatttttttaactgcgttagttgtcttattattcatgaattaagagttcttttatattttggataaaaaaccttttgtcagatatgtgtagtgagaatagtttcctccactctgggcatgtatttttatctctaacaaaatcttttgaagagcaggtttttatttttatgaagtccaatttatcaatttttttatagttagtttaaaaaaattatatctaataaatctttgttgactccaaagataagatttttctcctatgttttcttctagaagttttataagctttagcttttatatttaggcctgtcatccaagtaattactatttgtataggtgtttccaattcattttttttccaatttattttttaaaaagactcttcccttctttaaattacttgagacctttggtacaaaatcatttgaccatatatgtgtgtgggtttatttctgacttctggactccctatagtgttcttttgatttatatgtctaatttgatgccaatattatgctgttttgattgctgcagctttataaaaagtctagaagccaggcaacatccattctccaacttttttttttcaaggttattttggctattctagatgctttggattttcatatgaatttaacaatcagcttgtcaatttcctcaaataagcatgtgattttttttttcctgagacagagtctcactctgtcacccaggctggagtgcagtggcatgatctcagctcactgtaacccccacctcctgaattcaagcgattctctgcctcagtctcccaagtagctggggctacaggtgtgcaccagcacacccggctaatttttgtagagatggggttttgccatgttggccaggctagtcttgaactcctggcctccagtgatccatacttcttgaactcctatagtgctgggattacaggcatgaggcaccacacctggccagcctgctgaaattttaatcgggactgcattcaatttatagatcaatttggtaagaattgatgacttaacaatatcgtatcttccaatccctagtcatactatattgctccattcatttaggcctcttttaatttctcttggcaatattttatagctttcaatgtagatgtcatgaatgtctttgatcagatttacctttaaatagtcgtttttaaaataaacctcatacttaaaagctttagatttacagaaaaattgagcaggtagtagaggaagttcccatatatcctatacccaatttcccgttattaacttcttacgttagtatgttacatttgctagaattaatgaaccaatattgatacattattattaactaaagtccacggtttgttgagatttatttagttttaaactaatgtccttcttatgtgccagtatgccatccagaatgtcatgttatatttagtttatcatgtctccctaggctcctcttggttgtgatcgtttctcagactttccttgtttttgatgaccttgacagttttgaggagtgctggtcgggtgtcctgtagaatatccctcaaatggattttttcctcataatcaaattaaggttatggattttggggaagtaaagtgccatttttatcatgtcattcaagggtacatgatcaatataacctatcactcttgacgttgaccttgatcacgtagctgaggtagtgtttgttaggtttcctcaccctttttccccttttctcatattgtactctttggaaggaagtcactatgagtagcccacatggaggaaatagggaattatatcccatctccttgagggcagaatagctataaaaattatgtagaaatatttcatattttcaatgttactaatattataaataatggtttttatttttcatttctgattgtgtatttatctattttgttttttaggtttgatcagtttttgctttatgtatcttggagctctgtttttaggtgcatacacaattaggattgttaggtcttgttagtgaatggatcctctataattgtgtaatgtttcactttatccctggaagttttcattgacctaaagtctaaattgtctgataataatgtaaccacatcagccatacagtttttctttttattgtggtaaaatatgcatagcataaaatttactgttttaactgtttaagtgaacagtacagtagtgctaagtatgttcacaatgttgtgcaactatcactactgtccatctccaactttttcttcatcacatactgaagctccgtacccattaaacaataacttcacatcctctctctccctagccccgagtaattgctgttctaccttctgtttctgtgtatttgactatgctaagtacctcgcataagtgaaatcatacaatatttgtccttttatgtctgacttctttcacttaacataatgtctttaagcttcattcatgttatcacgtgtcagaatttaattccttaaggctgaataatattctgttgtatgtatatactacattttgtttattcatttatccacaaacatttgagttgttgccaccttctagatattgtgaataatgctgctatgaacattgctatacaaatatctgttcaagtgtctgctttcaatcattctgtgtatacacccagaagtggaactgttatatcaaatggtaattttatgttttttttttttgaggaactactatatggctttccacagtgacaacaccattttacatttccaccagaaatgcacaaagtttccaatttctccacatctgtgccaacacttgttgtatcagcaatcttttgattagtgctttcatggcacatatttttcatcactccattttcagtctctctatataattatatttaaagtgagtttcttatatatagcttatagttgggtcactttttttcgttgttgttgtttgtttgtttatttgtttttgagacggagtctggctctgtcgcccaggctggagtgcaatggcgcaatctcggctcactgcaagctccgcctcccgggttcatgccattctcctgcctc[211 bp omitted]caaacattgtctttatgtagttagacacttcacatttaatgtaattatttatatggtttgatttatacctaccaatttattatttttgtgtttgtctctttttgttcctatgttacctcctttctttcttcttttggattatttgaatttttttaatgctctatttttatttgctttttttttttttttgagacaagagtctcactctgttgcccaggctgtacatgttatttttaaactacatgactttggttttatcttttgttttgtttgatttagtgttgctttagaaacccatgtatacatacctaacatattgtggactattttgagccaatagtttatggcttcacataaaacaaggaaaacttacaactattgagatctgtttatcctcccctctttgtgctatagtgtgtgtattatatctacatgctctgaaaaatcccaccaatactttaaatttttatattcaaccatcatatatattttaaagaatttaaaagggggggaaatattgtattatgtgtaccaagtttactagttctgtttctctgccttcattcctgaaactttcctctgatattatttctcttcagcatttcttttaaagtatatctgctagtgatgaattctcttagttttcttttgtctgagaaggtccttattttatttccatttctggaggatattttccttgaatatagtgtctggattgacaattctttactttcagcacattaaaatgctgttttactgtcttctgacatccagggtttctgataagaaatttgcattcatttgaaatgttgttgccctatttgcaatgtataatttttctttaaacgctttcaaacatttttttctttatctttgatattttaatagtttcattatgatgtgctggggtatggttttcttcatttttaacatatttaggttttgctgagttttttttcaatctgcagatgtatttcttttattaaattggtgaagtattcgactataatttatttgaaaagtttcctatttcaatacctttctcctcctcttctggaattccaatcatgggaatgttagatcttttaatgttgtcccaaatgtccttagggctcaattcagtttttctatttttgctttttctcctccagattcgatattttatactgttcagtttttaagctcaatgagttgcctttgtcatctccattctgctactgactgattttaaatttcagttattgtattttgaagttctgaaatttccatttgcttgcttttatagtttctagttttctgacaacttttatatttccatttatttcaaatgcttacctatacctcatggagaatgattacaataacttttaaaagtctctgataatgcaaaaatctagaacattcaggggttggaatctcttgaatggcttttttcttgaagttggtcagatatacctgtttttctttttacatgtcaagtaattttggattgtatcctgagcattttcaatatgttaccagattctggtcctattaaaatctatagagaacattgagggttttttttttgtttgttttagcaggcagccaaccaggttaatttccttttttttttttttttttttttttttttttttcagatggagccttgctttgtcacccaggctggagtgtagtggcgtgatctcagctcactgcagcctctgcctcctgggttcaagcaattcttctgcctcagcctctcaaataggtgggatcacaggcacatgccaccacacctggctaatttttgtatttttagtagagatggggtttcaccatgttggc[132 bp omitted]tgttagttctaaaaactttgctgtgctatttgggtatgccactcagtgcgccactcagggattagctgatttctgagcaatggtttataacatagttcagttctcaatgtattttctatgttcctttgggtgtgttatttgaatgtgcagcttagtgatgagcctttaaattgtgtcagttcatccacaaaactgaggtatccccttctccagctctgtcttctgaatcttctctcacactctctggattctaagggctttcttcccaagatcctttgacccaaaagatgagattctctcagagttttagcctcccaccctgtcacccttggcttactctggtgagagaaaagagaagtatatgataactatccctccccacattttgaacaacagaaacctcttttttttcagtttctctatgtagacacatacattttcactcaggattttacatgcccatatgcactaatattagtgcagttccaccatcagtgctggcattgggaagggccaggaaaaaaaaaagagatgaaagggagtttcccccgtacattctgactcacagaggccctctttctagttttctggccagaaagatgagtttcttttagaattgtttcaagaggaatgcttcctggatttgcccatttggtatgatgttggctgtgggtttgtcataggtggctcttattattttgtttcttcaatagctagtttgacagtttttaacttgaagcagtgttattttattaaaagccttttctgcatctattgagataattttgtggtttttgtctttagttctgttatgttaatgaatcacatttattgatttgcgtatgttgaaccaaacttccatcccaggaataaatcctgcttgattctgatggataagctttttgatgtgctgctagatttggtttgccagtattttgttgaggatttttgcattgatagtcatcaagggtattggcctgaagttttccttttttgttgtgtctctactaggttgtggtatcaggaggatgctggtcttatagaatgagttagggaagagtccctcctcctgtttcttgaaatagtttcagtaggaatgctaccagctcttctttgtgcatctggtagaatctttggctatgaatctgttggtccagggcttttattttggtaggctatttattactgattcaattttgaagcttgttattggtctgttcagggattcagttttttcctggttcggtcttgggaggatgtatatgtccaggaatttatgcatttcttctagattttctattttatatgcatagaatattcataatattctctgatgattatttgtatttctgtgaggtcagtggtaatattctccttgtcatttctgattctgtttatttgaatcttctcccttttcttctttatgagcccagctaacaatcttttttttttttttttttttttttttttttaaaaaaccacctcctggattcgttgatattttgaatgatttcttatgtctcagtctccttcagtcatctctgattctggttatttttgtcttctgctagctttgggtttggtttgtgtttggttctttagttcttttagttgtgaccttaggctgtcaaattgagatctttgtaacttcttgatgtgggtgtttagtgctataaatttccctcttaacactgccttagctgtgtcccagggattctggtatgttgtgtgtttgttctcattagtttcaaagaacttctttatttttgctttaactttattatttacccaaaagtcattcaggagcaggttaattttcatgtaattgcatggttttcagcaattttttaaagtcttgatgtctatttttactgtgtgatggtccaagagtgtgtttggtatgagttccattaatttgcatttgctaaggattgtcgtatgtctgattgtgtggttaattttagagtatgtgccacgtggctatgagaagaatgtatattctcttgttttggggtggagagttctgtacaggtctattatatccatttggtccaattttgagtttaggtcctgaacatatctgttaattttctacctcaataaagtttgtaatactgtcagtagggtgttgtagtctcccactattattgtgtgggagcctaagtctctttgaaggtctctaagaacttgctttatgaatctgggtactcctgtgttgggtgcatatatgtttagcatagttaggtcttcttgttgaattgaactctttaccattatgtaatgcatttctttgtcatttttgattttttttttggtttaaagtctgttttgtctgaaattaggattgcaacctctactttttcctgttttccatttgcttggtagatttctcttcatccttttattttgatccgtgggtgtcactgcatgttagatgggtctcttgaggacagcataccaatgggtcttggttctttatccagattgccactctgtgccttttaattggagaatttagcccattacattcaaggttagtattgatatgtttggatttgatcctgtcatcatgatgttagctggttattatgcagacttgtttgtgtggttgctttatagtgtcactggtctgtgtacttctgtgtgtttttgcagtggctggtaatattatttcctttccatattttgtgcttccttcaggaactcttgtaaggcagatctggtggtagcaaattccctcagcatttgcttttctgaaaaggatcttatttctccttcacttatgaagcttagtttggccagatttgaaatcctggcttggaatttcttttctttaagaatgctgaatattgactccccatctcttttggcttgtaagctttctgctgaggttcactgttagtttgatgggcttccctttgtaggtaacctgtcctttttctctagctgcctttaacattttttttctttcatttcgaccgtggagaatcttttggttatgtgtcttgtgggtgatcttcttgtggaagtatcttccagtggttctctgcattccctgaatttaaatgttgacctctctagctaggtggagaatttgtcgtgggtgatatcatgaagtatgtggtctaagattctccacatctctttcaggaacaccaatgggttgtagatttggtctctttacataaccccatatttcttggaggttttgttcattccttttcattaatttttctctatttttgtctgactgttttacttcagaaagccagtcttcaagctccaagatttttttcttcagcttggtctattctgctattaatacttgagattgcactatgaaattcttgtagtatatttttcagctctatcaggttggccacattcttttctgtagtggctattttgtctgtcagctcctgtatcattttattgtgattcttagcttctttggattgggtttcaatgtactcctgcatctcaatgatcttcattcctatccatatcccaaattctatttccatcatttcagccatctcagctctgttcagacccttcctgaagagctagcatggttatttggaagaaagaagttactctggctttttgaattgacaagagttcttgagctggttatttctcatcttcatgggatgatgttcttcaatctttgaacttgctttcctttggattatttttttccttttattctatttgatatccttgagggtttgatgtggtataaggtgagttcagctgactggcttcatttaaggaagattttagggggccaatgctcagctctcaactcctggactgcatgttgtaactctggtgggcttatatcgggccctgactttgttctctggattctcgaggttgggaacgaactacactggggtggccaaggtgttcccaggctgctggtcactgcactacaatggatggtgccaaagcattttttagtgcagtggcagcaggatttgtcatcattctcacatgccagctgcagtggcagtggcaacatggtggggtgcatgctcatcagctgtggcagcttgctagtgggtaccgggatgcctgcttctgtgtgagcacttacagcagtggtggaggcagcatggctcaagggggcaggggggccccccactggtgactgtatgtgtagtagtgctggtggtggtgttagcatggggatgaggcactggcttctgcaggtctgtgtgtgtcccctgtgcatgttcatatgttatttaacctacactccatatttaaatttattctgtttttaatttaaattccttgtaattgatttgcctccagtttagcccacttttatgaattgtttttaactgtcacgtttctcctgtctccattaatctggcatgattcttcagctttctctttttgctcatggtgtttttgatactattttaatgtatggatatactgcattttctatatcaatagtaatcaaaagtaatgccatttttaatagccacacataaagtcaaatacctaggaattaaccaaaaaagttaaagttgtctataataaaaactataaaacactgacaaaaaaattgaagaggacaccaaaaaatggaaaaatgttccatgtttatggattggaagaatcagtaacgttaaaatatccatactacccaagcaatctacagattcagtgcaatctctgttaaaaataccaatgacattcttcagagaaattaaaaagcctcaaatttatatggaaccacaaaaaaacccagaataattgaggctatcctgaccaaaaagaacaaaaccgacttcaaattatactacagagctataataaccaaaacagcatagtactggcataaaaacagacacagagaccaatggaacagaacagagaacagaaacaaatccacacacctacggataactaatttttgacaaatgtgctgagaacacatgaggaaaagacagtctcttcaataaatgatgctgggaaaactggatatccatatgcagaagaatgaaactagacctctatttcttaccacataaaaaagcaaatcagaatggattaaaaacttaaatctaagacctcaatctataaaactaataaaagaaaactttgggccaggcgcggtggctcacacctgtaatcctagcactttgggaggctgaagtgggtggatcacggggtcaggagatcaagaccatcctagctaacacggtgaaaacctgtctctactaaaaatacaaaaaattagcctggcgtggtggcaggtgcctgtagtcccagctacttggaaggctgaggcaggagaatggtatgaacccaggaggcagagtttgcagtgagccgagatcatgccactgcactccagcctgggtgaaagagcgagactccacctcaaaaaaaaaaaaaaaaagaaattttcaagaaaaaagaattattttacaaatgtataaacaatatttgaaaaatgagggaaaaggccaaaaagccattagtacagtaggcaaaaggtttgaacaatttaccaataataataataataataataatcatggcctttgaaaatatgaaaagatgttctatttcatttacaatacaggaaatgtaaattaaaattacatcggcatactatcagttttagcctcacatcatcaggttatactaaacattttcctcttttcagttctctactgatcctcaagcagtaatttcttgtcagttccttgaagattttatctccacctttgttcactctccagtaatacttctgtaataattggggatatttcaatcaggaaatcattgtttatgtaatatttttgcttgaagactcaagagaaaggtaaggacgacactcagtgcaggagtccatattaccacataggcgtttcggatgggggattcccttctccggggacttggaagaagtgtggtcaagaagctatgtgtagttgcaacacttccccctggagggtaaaactgtgaacgtttactccttgggcattctgggaagtgtcccaacggtcggtggggttgcgggcacttccggtcaggcaggcggatccggggaattctgggaaatgtagtccagacgctctgtggagtcgcgggagctacggctgcgggagttaccctttattctgtgatattttgagctgttctgcgtctcgcaggcccttctgaatttcctggacctactctcggaaccctcaacgagctagcgatagatttagaggaaaggaagcaccgtcggaaagcaaaggtttggaagggtgagggcggcggtttgcgatccccgcggcagagccttcttgcgtttagggctgtcctagcatcccgagggactcggtcctgtcacgtttcgccctatttgggggtttctggggctctcagctcgcccaatccgcatccctccactactggcgcggggccgattcccccggtacaacgttggggtgttacttaatctccctgggactctttttgcttttctttaaatgggggatattaagaccttcctaatagaattgtcttgggaattgaaagaggtaatataaaagagtcttaaaacagtttttgttatagtgaatggcgatctcttgttaatttcctgagaaatggtcaggtccctgggctggtgtcagagctccagctggctcttctctctgatccctgcagaacgctggaaaattctggacagtctttgacc[367 bp omitted]ttccacagaaggaggggagggtcttgaccgttttgtcaagagtggtgacacaaccatggtattttgtagcattgtttccgcatcctgacttctctaaaaggattgcttggaggtagacggagtgactccttgactactgacaacaaagctccacgcgagtgtgacttgtcatttttcttttacagtaacgttcacatctattgtaggatgctgtaatcgggcatgggcattgataagaaagtcttaattgctatcttcaattctaagggctttatacaaagaaattcacgtacaccacatggtagctctgtggagaggtactgccatttcgtctattaaagatgagagtgaaacaaagggagcaggagttatttgcccatagttgcccaagtaataagaagtggagccggggttggaacctttgcggtccaggtcagagcccaagctgataatttctgggatacattctcactgaggcagaggaactagctggaatcaggtggggaaagcaagttaggacttgattggagggaccttgagagcaaggctcatgggcttggacctctctaggactcttttaaaactttgtcaactattttttttcacttattacacatattttgtattcttatagaaccatatcattatggagcattcagaaattgcagaaatacgacaagaaaaaaagcttaattacctctgaatgcaggatataaagatagtaaccattaagcttatttttatttatttaattcattttaaaattttctgagacagagtctcactctcatgcccaggatggagtgcagtggcatgacctcagctcactgcaacctccacttcccgggttcaagcgattttcctcccttagcctcccaagtagctgggattataggcacacaccaccccatcttttagtaaagacgagttttcaccgtgttggccaggctagtctcgaactcctgaccttaggtgatctgcccacctcagcctcccaaagtgcagggattacaggtgtgagccactgtgcccagtcattaagctttttttttttttttaatgcttattgccttattacaaaggatattacaaaagctacaggtgaagagatgcatagggcaaggcatgtgggaagggatgcagagcttccataccttcctgggtatgccactctccaggaacctccatgcattcagcaatccagaagctctcagaatccagtcctcttggttttttatggaaacttcattgcatagacacgattgattaaaccattggccactggtgatcagcttaacctttagcccttctcccttcccagaggttggggagtggggctgaaagtcccatgcctttactctctaaccatgcattggtctttcaggtgaccagccacatcctgaaactacctaggggttgccagccatcactcaattcatgagtatacaaaagatcaatttggagattctaaggattttagttgtatgccaggagacatgttagtgaccaaatatgcatttaggttatcaccgtacatacccatctttgaacccagatcctcttacataaaaaggatttacaactcagccaggcgtggtggctcacacctgtaatcccagcacttttgggaggctgaggtgggtggatcacctgaggtcaggagttcgagaccagcctggctaacatggggaaaccccatctctacaaaaaatagaaaattagccaggtatggtggcacatgcctgtagtcccagctactcgggaggctgagacaggagaaacacctgaacctgggaggcaaaggctgcagtgagcaaagattgccccactgtactccagcctgggcgagacagagtgagactccgtctcaaaaaaaaaaaaaaaaaaaaaaggatatgcaactcaaaagataccaccacattatcagaatcccatttagtcacattaataagtccagtccagtgggtgaagccactcaggtttgctggcttccatttgatatacggttctaaaagtaggagtggtcttagcaaaacatatagcttcaccatttcaggcatctggtgtaattgagctaagagacagtgtcatcttaaggtattaatatactactggagttctctcaattcataactcatttattcattcctttaccctcagctaccgtttctccttctttccattaatacacagactttttcacctttggaagggacattagaatcaccactgtgccggtctagactgcagacagcaatactagtctagcaaatgcttccccctcagttcacctccattcagatagggtaaggttacttaggtgcagaatagtggactgtttttaccatcaggaaatacagttatattcactgttagcccaattttgccagatggggtgaaggcacaacccatccccatcgggccctcaggaattctgacacaagttttagaaatttagttatggtttcttgcttaggaatcatccctgcttccaacacttgtagttgtagccctgatcctgtgaccactacatcaggtatggggaaaaaaattgaggtaatatggggaagaaggaaaaaaaaaagtgtaatcattatactggtgttctcctcccttggcaagaattgcatagtcatcccagcctcctttcccaccaggtcttccccagatcaaccagaaaaatagagaaattgctatcccactgacattgggtatgagcacacacttgcgaaggtgtgtaagccagccctgatgcttttatctctttgttttagacaatcaatgttttaattgcctgttccacttccctatcaaactattactctgaggaggatcgctctctattcattgctggacattgtgggctctatatctagtgtgtttcttggtcttctttcttctttttttttaaaaacactctgaacatttggatcttccaccatataagcaaaacccggtcaagaatcagtgtctactgctgtcaagacccatctgtagcctcccagggctaccagcatcacttgccagctacactcaggtccttcccaccagggaatctgtttcacagccatcttcactgtgtcatttttgctgacaaacagaacagttttcatctgcattttgtgcctcagagggtgcaagaacatgtctcgatttagcccatctttgcactgctgcactactcccatatccactaatttcacggacccaggcagccactgcaagggagcacatggggatatctgcttgttgattcaaaacctgaagggggctctgccaatgagcatcaacaggtcctactttaatgcacaccccctacttcaaatttctgtaagttcatgcctcacatgggcatcccctttaatagaccagatctccactgctcttctgcctgagtgtatggccaggccatttgccactgcccatgagtcagtaaagatcccaaagtgggtttctaccaccattcagtttttcatcactgctaggaaaacagcgtgtaattcagtgcattgagctgatatgtttttaccttctttgatcagggtggcatccttccaaatcatatgttcattcactttggaactgccattcacaaaatgagcagctctttgctggtcagttgagagttgtttatagcttctcacacagttccagagtcagtctccaggtagcatgactctgtataaactatttccattttattatggaactcttctgggcactgccatccccattagaatgttttcctaacattacctaagagagcataggtatttcaggtgtcaagatttttaatgtctttcagtcatagggctagcctcagttaatgccccatagtggggtagtaaatactcttcaagtcaaaattttctagtccaaagtctcagtaattgtcactagaaggcactcacaggcttctgtcataagccccagcctacattccacatggagctatcaaaacagaatttgtccataccagcacttcagattctattctacactgtgcggactcaggcaatcttactggttcccatttagcatgtccaactaatattgcttgaagggtagatttatatgccttctgttttgtaatgctagtcaggagaaacgttccctagtcagatacaatgtccattcccataaaacatttaggtaaagaagatacaacttcttaatataaagtctgtttaaatagtccaactttcataatcctatcaacccttacatttttatgttctagtcccaggaagttttccaccacttgcccaccccaacactccccccagccattttatcctctcttatgcgaaacactgagagtcagcaggaggggattgagccaaaggaccctggctcttgtcaatctttatcttgactaatctacttgactactgcccccaagcaattccaagtggggtttctcatcataatctttaccttcggccttttaaaatttctccaaactggagtaaatacaacaaacttatttgaaaccctttaatattgggggatcagcagaggatccaccaaactttcaatattattgtgttcagacctttgttttagcctcatcaatttccattttattttttccatttcttaataaaactgttaaaagtaaaaaatcttaaataagtcaaacaatttaattgagcaaaaaacaatttgcaaatcagacagcccctgagctagaatagattcagagaagcttcactgctaccatgtggttgaagaagatttgtaaacagaaaaaggaacgtgacattcaaaaagtggaagtgaggaacagaaacagccagtttggttacagctcagcttttgccttatttgatccttgtttgaacagttggctccctttgattggtcaaaactcagtgactggcacaagagtaggttacagtctgtttatacttccagttaggttacagttcgttatatatggataaaccttttcttatttttatttttattttttattttttttgagatggagtcctgctctgtcgcccaggctggagcgtagtggagcaatcttggctcactgcaacctctgcctcctgggttcaagtgattctcctgcctcagccttccaagtagctgggattacaggcacacaccaccacacctggctaatttttagtagagacggggttttaccatgttggccaggctggtcttgaactcctgacctcaggtgatctacccaccttggcctctcaaagtgctggtattacaggcatgagccaccataacccgcctggagaaacctttatacctaacttaaagtatgtaagaaagcagctttaggctaaacttaatttaacataatgatctaaagattttcaccctgttggaatgagtcccatgactctctctctttcttcttagtttcacctttatcattgttttttaaatgacctttaaaaaatttctagctttctgggatgagtcgtttgactctgccctctgcctttttcctcttgctaattaacctaatgtttttattaacatctttaatatctttaaagggaagctgagacagcaaatctgataaggcttctaggactgttgttcagttttgcaagagttaagatgtcaactaataaataaaatcaatactgagccacaaacaaaagaaaagatgttttaagtggggtcttgtgaattgcaatcaagaagtacagatctagcagtcagctaaatcatttcctgttctatccaggcaaggttgggcaggggcttataaatgtttactgtaagtttacatatctggaaggtattagtacagtccatgattgatgtcagttggttagcaacttaggatgtctttggttgatgatcaatctagttcagcatagctgtttccccaagagtttcgcaatcaggccatgtataaacaattccaatcaaatgcagctggttttacaatttggcccagttaaacaggttaaaatccatctggatgtgtacataactgaggtccaactccacatgcctctttttagaaacttctgacataaccatctccattttgagttttctttttacaaaagtcacgtggggtatccatgcgaaaggggcccccttagccacagcatttaccatgacctgggtaagaagcatattcagcagatgaatatcccagtcatcataaattcagtcccacgtggcttgcatgcggtatatcagctgcatcatctggggtatcccaccgagcatttatagggtgagttgagcagtccgctttttcagggcaagcagacattaccatgtcttttatccagttgatcaggctggctgttcccttgggaacaatctgttaacattgatagtgagattcaggcaatatggttaaatattgagtttattcaaacacaaaattttaagatgtccacctgggaggacacggacttcaaaagattggataagtgctctgaagtggaaaggtttgagagtcattatgtaggcagggtctaggaagcttaacaggatgtcagcattttctatacaagattaatgcatagttatagcaattcgatagcagtgtttccttttattgggaagaacgtatttaacattctgcattagagatgtaatagtcaaaggggtcttttatctcagacaaagaatcttttatcttagatgctatctggtctgagccaggaacaagaaaacaaagaaggaagttaagaggtcaagctcagtgactcagtttccttcgggcctaacaacttttagaagcccaaaatagataagactattgggtttttggttgttttttttttttcacatctcctgtgtgtctgcatcaggtgtttaccgtctgtaattgttgcatcatgtatcaccatctgtaattgtttcatagtgaactgtgggtcctacataaacccaaatatgctcttcaatgcaacatttaaaaccaaagatgctgctacttagtttctctcacaatccagttgagtaaagattccttaagaagctacaaaataaacaattccttcacactgtacactgtagtttcagtttcttggttttacccttcccatacactgattgccttttggtaaccacaggtcttagaggtacttactgttgtcctggtatattttttcccttagggacagctttgaggcaagtggctaaagcttagattcactaaaattcgaacttggtcaagcatcagagtccaacccagtccttttaattacatttgatatagtttggatgtttggtccctccatatctccagtgttggaggtggggcctagtgggaggtgttggatcctgggggtgggtccgtcataaatggcttagtgctatccccttggtgattagtgagttcctgctcagttagttcatgtgagatctggttgtttaaaagaatttgggtcctccaatttctctctcttgttcctgctctcactttgtgacatgcctgctcctacttcaccttctcccatgagtgaaagctccctgaggcctcaccagaagctgagcacatgccagcaccacatttcctttacagtctgaataaatgtaagccagtgaaacctcttttctttataaattacccagcctcaggtattttgttacagtgacacagaaatgaactaatacagaaaattggtactgaggtgcaatgcattgctataaagatgcctgaaaatgtgaaagtggctctggaactggctaatgggcagaggttggaaaaagtttggagggctcagaagaagataagaagatgagggaaaacttggaacttttttttttttaactttttcactgagccatgggaacttcttacagactgattaaatagctgtgaccaaaatgctggtgggaatatggacaatgaagtccaggctgatgagatctcagatggaaatgaggaagttattgggaactggagtaaaggtcacccatgttatgtcctagcaaagaactttgctgctttgtgttcatgccctagggatttctggaagcttgaacttaagagtgataacttagggtacctggcaaaagaaatttctgagcagcaaagcattcaagaagtggcctggctgcctcactgcttcaaacagcctacaattatatatgggagcaaaaaaatgacttaaagttggaatttatatttaaaaggtaagcagagtataaaagtttggaaaatttgcagcctggccatttagtagagaaagaaaaagcatttttaggagaggaatacatgtcggctgtggagcaaccactcgcaaaagagatttgcatgactaacagaaagccaagtggtaatatctgagacaatgggaaaaagacctggaagacatttcagaagtcttcaggaaagtccctcccatcacaggcctaggggcctaggagaaaagaatggttccaagggccaggcccagggaccccctgccctgagcagcctcaagacattgtgccctgaatccggccactctggctccagcctcagcttagagtgccccaggcgcaggctgggttgcagctccagagggttcaagccttgatagttgtggtagtttccacattgtgttaaggctgcagatgctcagaatgcaagcatgaaggaggcttggcagcttctacctagatttcaaaggatgtatgagaaagcctgggatcccagtcagaagcctgccacagtgggggagccccaacagagaacctctaccagggcagtgccaaggagaaatgtgagggctccccacagagtccccactagggcactacctaatggatctgtggtaaggggaccactgccctctgagaagtggtcctgagaccactgctcagtcatatcacttggctgcccaaggccttgggagtctatctcttataccaggatgtgggacatggagtcaaggattatgttggagctttaagagccctggctggagtacagtagcacaatcctaacttgctgcagcctttaactcctagactcaagctatcctcctgcctcagcctcccaagtagctgggattacaggctcaagccacagcacctgcctcttcatatgctctttacccaaattttccaattatttacattttgtattttgctttgttaacacccatcagccaaataccactgggaacaaacttataatgagaaacaacttattgtagctttctgcatcaaggaaccccacatagcaaggtgatcatggagtgtcttggtaagaggcatttaggaagggctggctatagagtttcatataagatgctaggtagtattagatataatattaagtaatatcactattaaatactagatatcaattaaaagactattaatattagttaattctgttacctattagatatggctagacaccatcatcttttctatccaaactcccatatttaaatttgttgtgctttttaaagttcttgtaactgttttcccccatcccccagtccaaagtccaattttatgtactgcttttaggtgtcacatttctgtagtcttctttaatctagaaagattcaacaggctttgtctttttattcttgacatccttgaagtatataggcaaagtattttatagaaagatagtcatttgggatttatgtatttcatgtttaggttcagattatgcattgttggtgtggataccacagaagtgttgaagtgtcataacaggggccaaatgatgtctgtttttcccttcattggagatctcaactttgttcacttggccaagatgatatctttcagatttttccactgaaaggttactttttaattaaattttgaaaataaaaacgtttcttacgggagatacattattagtgggcattatcctgtaaagattagcttccacttctccctgatttattaatcagtttcttcaactataaatattctatcaatatggacccacaatccagttaaataacatgtagattaactgttattatttccaactttattgaggtgtattttacatgtcatagaatttacccatttcagtcgtacgatttaataatcttcaggaactttgaacagtggtgtgaccgtcatcataattcagtttagatcattttcgccccccaattggactccttgtgcttatgtacagttaaacctcattctcacctcaaatctggagcaaccactaacctactttctctatatatacatttgcttattctggatattttataaaattgaattttacaatccatggggtttttagactggcttctttaacttagcataatgtttccaaggttcatacatgttgtagcatgagccagttcttcactcctttgaatttccaaataaaattctgttgtatggatatgccatgatttgtctattcatttacccgtaggagggcattttgcttgtttgcagtttggggttatgagtaatgctgctatgaacattcatgtgctaattgaaaatacttgtctatgttggtggtcggcattcctagttaccatttcctgtctgtttttctgcctttcctggcactttccaggcatgatttcaccttcacttgaactgcttcattcaggactctgcaaattccctgaagtagaaggaaaaatgaccacattcaaagtgagtagggcttgcctctcttgctgttaaaattccatcttactactcatattgtcacatttttatctgtcttgggaagactcaaggagaacaacaagcatttgagggcattttgtttgccagatgcttcctttgctgcttttgaattgactttccgtttggttttagttcttgttttcttacataatttcttttctgtagtagataaaatagtaggaatggataattctttcacttcactacttctctgctcacaaattagctgtttttatcttgtattcttcatcatgtacattcataactgtatttttattgatgacatacctctaattttaaattgtgctcgttttatataatattatataatgttccatttttatattggtatcatagtcccaatgaattaatgtaccttcttatttttaactacttcacactcatagacatttaggtggtttaggaattttactgttttaagcaacactgctgtgacagctttcctatatataaccccttccccccaaaattaattctgaaaacaagataggatacttttgacatgtattacattggctgttttatagatggtagattatttcaacagggcacagcacatgaggctctgactgctacttcccacaaatattgttgttggagttttcacacaggaagagctagattctgtgtttgccatgccttactcataccttgtatgcatgttatttattggtctcttcttattcctttatggagtaagcagttttaccaaagtagtaggtaccttcatttgaaatgtccagtgatactggaagattggccaatcacttgtgttgtgttactatatttactcagagaagcagaatgcaggttttagtctcatcttcctcttaaactcataaaatatgagaaatctgctcagattcacataggcaaccaaggtcaggaatgttagccattctgctcatttataatcaaataagtgagaatgatattaatacaatgaattcttcttcctaatcatattaccgaaaccatgggaatatttacaacctgctcttaaccatcataaggagaataagggtacttgtgttcactcggaagagtgggaagtaggtaaaaaatttggaagaaagtatgaaattatgtaatcacaattttaaatgtgtttattgacattctcattttcatttgacattattttaaataatcaggagaataaagtctatataaaattattttctttacaggattgataataaaaaatatttaatatgaagtattcattatttaaataaaaagagatcatttttgccctggaatactttgcagatatgaaatgagatgaaataaataacaataatgacagttataataaaaatagataatatttattaaatacttagtctttgccacacagttttcccaatgctatatatatttccttctttaatccttgaaaaaacgataccaggtgaaaatcattatacagacaggaaactaatgcatgtaggtgagcttgtccaaagccacacatctaggaagggacaaagctttgggatgtgctctgaggcatgatggttccatatcatgacattgaatgatgcaactaatgtatgtagtttgtgccttgagcatatagaggatgcaatgcatagctgtcccacacaggtcaccatatactggttagtttgacagatactaaagaaaagttaacaacatccacagtttgagtatgaaaggaagacaatggaagagaggaagacaatggaaattatcaaagttgggactaaacttctaaatgttactggggcaattggcaacaacacactaaaacctaaatacctgtagcccaggaggcagcatgtagagtcctagagggctacttacaagtagactcaatgactgcacaaagtaaaagtacaggacttcttttatatcattgcacttctgatgaagctcatgaaaatctgcgtgtgtcattgtcaggatataggcagaatgagtgggaaatctgtatgttgacctacatccctcaagatctaggacaacttaccacacctgtcccctttgcctacttagtgccacccttctttgaataatcattggtcataagatttaggttttgtatgttggatattttaggaggcagtgacattcaaggatgtggctgtggtcttcactgaggaggagctggggctgctggaccctgcccagaggaagctgtaccgagatgtgatgctagagaacttcaggaacctgctctcagtaggtgaggacaggcaccctctgtaacagaatgttaggccccaggaatggctttgtattccaagtttgagtatgcattgggaacctaaatttccagtaaattttccctagatattacctacaatgggttggaattaagcatgtcactgtgtgttcacagggaatcaaccattccaccaagatactttccacttcttagggaaggaaaagttttggaagatgaagacaacaagccaaagagaagggaattcaggtaagaaccaagtaactgtgcatccttgtacatgactcttccatctgttttacttctgtccatgcctatttccatcaccctggtctaaattgccaaacttctttcataacttattgcaactgccttccttctttaaagttcctttggcttcattattcatgttcatattttattagtttaataatttatcatacaagattttagactaggaaatttaccagaattagtaacgggttaagtgtatgtatgttattaattatttaattcagtcttttatttctaccaggattttacatatgagatgtgatgtggttctaaattgttctcttgaaaaccaaagaccatagtgcactcggaaaacatgaacttaatgtttcctgttttcattaaagtttaatgccatgtcctaagtgtgaaatcttgaaaacattgaatagggcttcacttgcccacatatattaattctgtgtctttttaggaggcaagatccaaattgagatggagactgttccagaagcaggaccacatgaagagtggtcctgtcagcaaatatgggaacaaattgcaagtgacctaaccaggtctcaaaactccataaggaacagctctcagttcttcaaagaaggtgatgtcccctgccagattgaggcaagactatctataagtcacgtgcaacagaaaccttaccgttgtaatgaatgtaaacagtccttcagtgatgtttctgtctttgatcttcatcaacaatcacactcaggagagaaatctcatacatgtggtgagtgtggaaaaagcttctgttacagcccagcccttcatattcatcagagagtccatatgggagaaaaatgctataagtgtgatgtgtgtggtaaggaatttaatcagagctcacatctgcaaactcatcagagagtccatactggagagaaaccattcaaatgtgggcaatgtgggaaaggcttccatagtagatcagcacttaatgttcattgcaaattgcacacaggagagaaaccttataattgtgaggaatgtgggaaagccttcattcatgattcacagcttcaagaacatcagagaatccatactggggagaagccattcaaatgtgatatatgtggtaagagcttccgtgttagatcaagacttaataggcattccatggttcacacaggagaaaaaccattcagatgtgatacatgtggcaagaactttcgtcagagatcagcacttaatagtcattccatggtccacatagaagagaagccatacaaatgtgagcaatgtggaaaaggcttcatttgtaggcgagatttttgtaagcatcagatggtccacacaggagagaaaccatataattgtaaagaatgtgggaagaccttcagatggtcctcatgtcttttgaaccatcagcaagtccacagtggacaaaaatccttcaaatgtgaagaatgtgggaagggattttatacaaattcacgacgatcttcccatcagagatcccacaatggagaaaagccatataactgtgaggagtgtggtaaggactataaaaggaggttggatcttgagtttcaccagagggtccacacgggtgagagaccctataattgtaaggaatgtggcaagagctttggctgggcctcctgtcttttgaaacatcagagactccacagtggggaaaaacctttcaaatgtgaagagtgtggaaagagatttactcagagttcacaacttcattcccatcagacatgccatactggagaaaagctatacaaatgtgagcagtgtgagaaggggtacaacagtaaatttaatcttgacatgcaccagagggtccacgggggagagcgaccctataattgtaaggaatgtggaaagagctttggctgggcttcatgtcttttgaaacatcagagactccacagtggagaaaagccattgaaatctggagtgtgggaagagatctactcagaattcacagcttcatttacatcagtaagtctatgtgggagaaaagccatataaatgtgagaagtgtgggaagggctttggctgggcctcaactcatctgacccatcaattctccacagcagagaaaaaccattcaaatatgagaactgtgggaagagctttgtacatagatcatatcttttttttttttttttgagacagagtctcactctttcacccaggcctgactgcagtggcgctatctcagctcactgcaagctccgcctcccaggttcacgccattctcctgcctc[221 bp omitted]ggagataatccatacaaatgtgaggagcatgggatgtactacaacaggcacttgacttgatatgcatcagagggtccatatggcagagaaaccgtggaagtttggggagattgccatgtgcttcagttatgcctcaaagtcttcaacttcattggactgttcactttcaagggaaaccttagtaaggtgatatctgtgatagtcttctcaactacaagctcatctgagagttcacaatgggagaagcattaaaaatttgatacatgtggtaagcacttcagtttgagttcatatctcatagcttattacagaatccatgctgatgatacatttcatacagtctcaggagggaaaatatttaagttaaagtcagagtttcagccatagttcagcatacccacgtggttttagaaccactgtagcacagaacctttgtaatttggggcttcattcagaagtttggcaattatagttattcaagagacaggccttagaaagaataggagtttgttcaggcatttacaaatctctaatgatggacatgtcaaaattgatgtcggctagaatataagctgcatttacctttgctgcagaatcttcacaaccttaacactgattggcactttgtatgtgtgtttggtacatgtaagagatgtagaaagagctttggctgggcttcatatcttttgaaatatcagagatgtgatattaaaggatcaaaaggagaaaacatatttcaaaattgtatctaaaagaggaaacctgggatagaccaagatggccaattagaagcagctatggttcatggtactcatacagaggaatgaaaatgacagataaattcagcaccttcaattgaaatatctaggttctctcattgggactgactaggcaatcaattcaacccacagaaaatgaagaaaagtagggtggagttatggcccacttggtgtggcatggagccaaaggaaacctcacccccacccaagggaagcagtgagtgattgtgcgaccctgcgcaggaaaccatgctactcaaggatctttgcaacccacgggtcaggagatctccttgtgagcccatgccaccagggccttgggtttgatacacagagctgtgtggagttttggcagagcggcctctcaggcacacacagagacccaggaggtttacatgctctagccccagaattcctggcaaggtggcagattcatccttatattcccctaggaagggggctgaatccagggagccaggcagcaacattctgtgggccccacttccatggcaccttacaaaacccactggcttggaatttcaaccaaccaacagcaacaggcttcagcctgaaataggagggagctcctgtgggggaaggctggccaccatttctgtggttcagtctactcagcattccagcctgccagctctggagagaccaggttgtctggacaaggagaggatccccctgcccaacacagaacacctgctttgccagatcatgcccagactgctgcttttttttttttttttttttttttttttttttgagatggagtctcactctgttgctcagactggagtgcagtggcatgctcttggttcatggcaacctccacctcttgggttcaagcaattctcctgcctcagcctcccaagtagctgggattacaggcaggtaccaccacacctggctaatttttgtatttttcatagagacagggtttcaccgtgttggccaggctggtcttgaactcctgaccgcaggtgatccgcctgcctcagccttccaaagtgctgggattacaggcatgagccactgcacctggcccagactgcttctttaagcaggaccctgatccattcctccccactgtgtggggtctccctgtggggggtcttcagtcactccagccaggcttatactgacagaaatctaatctctacctcagatggagctcccaggggagtggcgaccactgtctctatggttcggttgacaaagctgttccagcctgctggctttggagagtctgggcaatctgggtgaggaagggtcctcccccaccgcagcacacctgctgtaccaaaagcagttggactgcttctgtaagtaggtccctgatcctgttcctcctgactcagtgagacctcccaacaggagtctctagacacctcctacaggagtcttcaggccagaaactggtcagtatccccctgggacagagtttccaaaagaaggagaaggctgccatctttgctgttttgcagctttcactggtgacacctccaggtacgggaaaaacggaggcaactagggtctcgagcagaccccagcaaactgtggcagccctacagttgctaacagtcagtggcttgactgttaaaaacaggcagaaaacaacaagaacatcaacaaaaagaccccacaaaaaccccattcaagggtcagcaacctcaagattgaaggtaggtaagcccacagatatgataaaaagtcaacacaaaaaaatgctgaaaactcaaaaagccagagcgcctcttctccaaatgactacagcacctctctagcaagggtacagaactgggctgaggctgagatggctgaactgacagaagtaggcctcagaaagtgggtaatgaactttgctgagctaaaggagcatggcataacccaatgcaaagaagctaagaatcatgataaaacaatacaggagctgatgaccagaatagccagtttagagaggaacataactgacttgatggagctgaaaaacacaacacaagaacttaacaatgcaatcacaagtatcaattgtagaatagaccaagaggaggaaagagactcagagcttgaagactatctttctgaaataagacaggcagagaagaatagagaaagaatgaagagtaatgaacaaaacctctgaaaaaaaatatggagttatgtaaaaagactgaacctatgactgattgcggaacctgaaacagatggggagaatggaaacaagttggaaacatactttaggatgttatccaggataactttccaaacctagcatgacaggctaatattcaaattcaggaaatgcagagaaccccggtaagatactccatgagaagatcaaccccaagacacataatcatcagattctccaaggtcaaaattaaaaaatgtaaagggcagtcagagagaatgaaaggtcaggtcccctacaaagggaagcccatcagactaatagcagacatctcagtggaaaccctacaagccagaagatattgggggtcaatattcagcattcttaaagaattctttgccagaatttagtatctggccaaagtaagctttatgtgcaaagaaataagatccttttcagacaagcaaatgctgagagaattcatcaccaccaggccttccttgcaagagttcctgaaggaagcactaaatatggaaagaaaaaaccattaccagccactacaaaaacacactgaagtacatagaccaatgacactataaagcaaccacataaacaagtctgcaaaataaccagctagcatcatgatggcaggatcaaattcacacataacaatactaatatcaaatgtaaataggctaaatgccccaattgaaagacagagaagtgcaagctggataaagagccaagaccgattgatacgccgtgtttaagagacccatcacacgtgcaaagacacacataggctcaaaataaagggatggaggaaaatctaccaagaaaatggaaatcagaaaaaagcaggagtcacaatcctagtttttgacaaaacagactttaaaccaacaaagataaaaaaaaaaaaaaagacaaagcaaggcattacataacagcaaagggttcaacaagaagagctaactattctaaacatatatacgcacccaatagcagaggacccagattcataaagtaagttcttagagacctacaaagagacttagactcccacacagtaatagtgggagactttaacactccattgacaatattagatcattgagataaaaaattaacaaagatgttgaggaccttaactcagctctggattaagcagacctgatagatatctgcagaactctccactccaaaacaacagaatatacatttttctcatcatcacatggctcttaaaaattgatcacataatcggaagtaaacactcctcagcaaatgcaaaagaactgaaatcataacagtctctcagaccatagcacaatcaaattgaactcaagattaagaaattcacccaaaaaattaaaacaaaaatgaaattaactcagaaccacacaactatgtggaaattgaataacctgcttgtgaatgactcctgggtaaatactgaaattaaggcatagatcaagaaattatttgaaactaataagaataaagacacaatgtaccagaatctctgggatgcagctaaagaagtgttaagacagaaattaatagcactaaatgcccacatcaaaaagctagaaagatctcaagttaacaacatcacaactaaaatagagaaccaaaaacaaaccccaaagctagcagaatacaggaaataagatcagagcagaactcaaggagacagagacacaaaaaatctttcaaaaattaacaaatccaggagctggttttttgaaaaaaattaatagactgctaactagactaataaagaagaaaagagagaagaatccaacacaatcagaaatgataaaggggatatcaccactgaccccacagaaatacaagcaaccatcagagaatattataaacacctctctgcacataaactagaaaatctagaaaaagagaataaatttctggaaacatacaccctcctaaggctgaacctggaagaaattgaatccttgaatagaccaataacgacttctgaaattgaggcagtaatagtctaccaaaaaaaaaaaaaaaaagcccaggaccagacaaatttacagctgaattctaccagaggtacaaaaaagagctggtaccatttctactgaaactattccaaacaattgaaaagaagggattcctccttaactctttttatgaggccagcatcatcctgataccaaaatctggcagagataaaacgaaaaaagaaaacttcaggccagtatccctgatgactatcaatgcaaaaatcctcaacaaaatactggcaaactgaatccagcagcacatcaaaaagcttatctaccacaatcaagttggcttcatccccaggatgcaacgttggttcaacatatgcaaatcaataaatgtgatcacataatgagaaccaaagacaaaaatcacatgattctctcaatagatgcagaaaaggcctttgataaaattcaacatcccttcatgctaaaagctctctgtaaactaggtactgaaggaacatacctcaaaataataagagccatagatttcaaacccacagccaatatcatactgagtgggcaaaagttgtaatcattccccttgaaaactggcacaagacaaggaccagccccccgccctttccccactcctgttcaacacagtattggaagttctggccagtcaagtcagacaagtgaaagaaataaagcatattcaaatagagaggaagtcacagtatctttgtttgcagatgacatgatcctatatctagaaaaccccatcatctcagcccaaaagctttttaagctgataagcaacttcagcaatgtctcaggatacaaaatcaatgtgcaaaaccgctagcattcctataaaccaacgacaggcaagcagagagccgaatcatgaatgaactcccattcacaattgctacagaaagaataagttatctaggaatacagctaacaagggaagcgaaggaccccttcaaggagaactacaaaccactgctcaaagaaatcagagaggacacaaatggaaaaacatttcatgctcatggataggaagaatcaatattgtgaaatggccatactgcccaaagtaatttatagattcaatgctattcccattaaactaccgttgacattcttcacagaattagaaaaaaaaacctattttaaaattcatttggaaccaaagaatagcccaaatagccaagacaattctaagcaaaaaagaacaaagctggaggcattatgcaacccaacttcaaactatactccaaggctacagtaacgaaaacagcatagtactggaacaaaaacagacacatagacaaatggaacagaatagagaactcagaaataagaccacacacctacaaccatctgatattcaacaaacctgacaaaaacaagcagtggggaaatgattccctatataataaacggtgctgggagaactggctagccatgcacagaaaattgaaactggaccccttccttacaaacattatacaaaaattaagatggattaaaaacttatgaaacccaaaactataaaaaccccagaagaaaatctaggtgataccatccaggacatagggacaggcaaagatttcacgatgaaaacaccaaaagcaattgcaacaaaagcaaaatttgacaaatgggatctaattaaactaaagagcttctgcacaccaaaagaaactattatcagggtgaacagacaacctacagaatgggagaaaatctttgcaatctgtccatctgacaaaggtctaatatccagagcctacaaggaacttaaacaaatttacgagaaaaaaaaccattaaaaagtgggcaaaagacatcaacaggcacttctcaaaagaagacgtacatgcagctgacaaacatgaaaaaaaagctcaacatcactatcattagataaatgcaaatcaaaaccacaatgagatactgtctcacatcagtcacaatggcaattataaaaaagtaaaaaagaagccatttgcagcagctcaaagtgctgtaatcccaaacctttgggaggctgaggtgggtggatcacttgaggtcaggagttggagaccagcccggccaacatggcgaaacgaacccctgtctctactaaaaatacaaaaaattagctggatgtggtggtgcatgcctataatccccagctacttgggaggctgaggcatgagaattggttgaaccggaggcagaggttgcagtgagtcaaggtcatgccactgcacttcagcctgggcaacagtgaaactgtgtctcaaaaaaaaaaaaagtcaaaaagcaacagttgttggtgaagttggggagaaaaaggaatgcttttacattgttagtgggagtataaattagttgaaccattgtggaagacagtgtggcaattcctcaaagatttagaggcagaaataccatttcacctagcaatcccattactgtaatatatacccccaaattataaatcattctattagaaagatacatgcacttgtatgctcactgcagcactattcaaaataacaaagacatggactcagcccaaatgcccatcaatgatagactggataaagaaaatgtcatacatatagaccatggaatactatgcaaacataaaaagaaattagatcatccaggacatggatggagctagaagccgttatcctcagcaaactaacacaggaacagaaaaccaaacactgcatgttctcacttataagtgggagctgaatgatgagaacatatggacacatggtgggaaacaacacacactggggcctcttggaggggtggagggagggagagcatcaggcagaatagctaatggatgctgtgcttaatacctaggtgatagattgatctgtgcagcaaaccaccatggctcacatttacctatgtaacaaacctgcacatcctgcacatgtacccctgaacttaaaataaaagttgaagaaaaaactaaatcatagtattaaaaaggagaaatcttgcaagaaataatttatggaaacatgagttgaaatgcagggtacactcagcactgcaatgtagacctttattttgattattatcttattccacttggctcctggcttctcctcatcctctgttctcaagtcggattcttattatttgggactctgtctagtgttcccttgattgtatatagtataaatttaacaatcatttgtcacttttctcacaatatgaggtgaaaagattttgtaataacagaccactgcatattgtacaattaagttttttcaacaattttaaggcaggattcacagtaaacacttttttcttttaaaaaattatttttaaggaatagagacagtctcaccatgttgcttggctggccttgaacttctaggctcaggcaatcctcctacctcagcctcccaaagtgcttgaattataggcatgagccaccacacccagcccacagtaacatttctaatgtggcagatgtagttacattgacaaaaatttttctggtaaaggccaggtgtggtggctcactcctgtaatcccagcactttgggaggctgaggcaggtggatcacttgaggccatgggttcgagatcagcctggtcaacatggcaaaaccccgtctctactaaaaatacaaaaattagctggtgtggtggtgtgtgcctgtaatcccagctacctgagaggctgaggcatgagaatcgcttgagcctgggaggcggaggttgcagtgagctgagattgtgccactgtactccagcctgggcaacagagcgagacttcatctaaaaaaaaattcctaataagttttgaattgatcatgatttgtgattctgcgtttctgtgcaggctttaatatgattgccttctaattgctgtagttatttcttttatcagacttctcaggtagaagctttgccaaatttgaaggaaaatttttggcaacctcagtatttcttcccatctctatgaactaccaagaacatttgttggagtttggtgatttcatcatacatattcattattggagcaagagtaacctttacatactcttctttattgttggccataagaatacgttttttggaaagtggtatatggcagtatgtataaggtacaactgttcaacctggaaatcataggatagaaaattacaacattaaaactctgaaaattagtagattacatggatgatgtcacttaattttaaaatggaaagaacaagtgttcaaccacaggaatttgtatgaagtgcatttattaatataaaaacacaaagccagtaaaatgatgacatagatgtacaataaaaagagaagagcataatgtatgccttagggaaatcctattgtagccttcataacaaactaagtgtctttgtgtttctgggtttgtttatttggttatttttagtgtgtatgtacatcatttgtggatgaatattctgacattttccctggcaatgagtatttgctggaatttttcattttataattttatgcattttaaatttctcattgaacaccaattttaccaaagcagttatgtgatgaaaaatttgaaaaattattaatattaatcacttacctataaggactctgaataagattgctctacattgtcatatgacagttcaaaattaaggaatagggatgtggaagtcatatttcaaaataaaaaaatgtatctggtcacctggatatacagattgatgagtgtggtcaactgccttcataactaatgtgtgtgattctgctttaggcataagtcaggaagcaagcaaatcctagtgacagaaataatgtgggtatatatagttgtggaggttaaaaaaacagattctttgaagaacaaatgcgcatgatcagggaacttaacatgacagcagcagtctcttagtgtgtggaaccagctcggacaaagagctgatttgggtgctaattcatagttatacaccatggtgtaacttaactgtattaggttaaaaggcattcttcaaagtgtctagttgagatagtaagcttttcataattaattttctaaataatgtattttcatgatgctatattcatgctgtgccagtttggatagtagattggaggtccctaagaccacctctgggttctgtgatttactaaaataactgagactatagttgtacttataacaatattacagtgacaagatacaaaacagaatctgtaaagggaaatggctcatgggcagttgtctagaggaaaccagaagcaagcttaccagagtcctctctgcatggtgttacataagactcaactcctctagcattgaattgtgatactacttgtgaaatgtctacaatggaagctcattagcaaccagcagcacaggttcttattgagattgattatgtaggtatgtgtctagtacatatcaagattcccaactctaagaagaagagcaagtgttccaaataagctgcattgtagagtttaggcgcagtgaccactcctacccattatggaaaggtggtaactctctcaaaccccatgttccttgactccagccaaaggccagtgttgcaaacagctctttttaaagttagcagtctgacttatgcctgctatgttaactttttgtgcatgtggtatcagaaaagtagggcctgcagtcttgtggggttttcttaaactatcaccagataatagttcatctctaagataattatttgtaaaagaaaattcatcagattacatttttaaatatttttataataaaaaataccataggtaggccttccatctaccctcgtgtgtgtctgggtcctcaaattggtcacaggatgatattaacagctgatttgtttttattgttcatatttatgtctcacagactgcatgagtatttgactcccaataaaactgaatattgaatacctagcttcatatgtagtacctgagcttttgtgtggccagtatttcttgccacttctcacgatggactgggtctcttttatgtatatgaccctggcaagttcactatgttaactttgaaattgggtacattattataattgggaattattgcagagtctcaatctctgtgtttgaaaaatgagggaagcttcccaagttattattctctgaccatatcagtaggatatccatttaaatgtttgagctaaatgccacaacatttgtgtgtgtgtgttttttttttttttttttttttttgatacactatgacaataacttcctggatagatttgttgttgtttttaatttttatagtaaaaatacactcattttacttgcaagaataatgtctagacattggaaacaattactttggtacagaaaagtctaaaaaagaaagtggaagataggaagtatgaatattttggtaaggatggttcagcatatctatgcatataggtaacaattgtatagaattttacaaaactaggaacacactaagcatacttgctcctaacaggattgtcctaatatgacactaatgttaaaggctgtataaataagttgacctccaacctcatttctaatgcctgctgtatcctggtgtactgaatattaatttttccttaaacagttttctgatgatgaggatctgtgtggtatcaattttaattacaacatgcctagactacagtccctagttatttaatcaaacagtaatacatatatatatatatatatatatggaaggcattttgtagatatttagcccataatcagttggctttgagtagggatattatgtgagataatgtcagtgggcctgatgaatcacttgaaattatttaaaagtagagctgaagcttctttgaaaaaagaaattgcaccttttagtagcatcttcctctcgtgggttagtgttccatctgagccatcctggggtatagccatatgttttttgcagttgcttagccagtcccacagtggcataagaaagttccttgcaataaatcatttgtatatgtcatattgattttgttactccgtttcaacgctgaccaaaagatattttgttccagaagtggttctagaggaagagaatcttaagaatgagttttctaaatcaattctgtgttttctcaaattggatttctcatcttttttagtttaaaggcactattgactttatttccagtggaaaatagggcattggttgttaaagccacgacatggtgataaatatatgccaaatatattggataatcccaagcatatacctatagaaggcatgattctagatgaccatgaatttgttagtttcggacataatagtcaaacgaaggactatagtggtatttactagttgctctgatttgtgcttcagaaagtgggaaagaaaaagatgaggacaaggcatcaaattccagctcaatcagaataacctgaaagcgtcagtcattatgcatggcttcttaaccttgtgttgttgatcttggcattcatagtaaataacttgacaggaaatctattacactgttactttatttgtataggcaggaggattctcttgcaagtaaacagaaatccaactggaattacctaacagaatcacatctcccaaatcaattctaagacaagtccagtttacaaatccacaattgcttcaataaacgggaggtcagttctgtattaggatggacgctggtacgttgcagagtgcttcacaaggccctacagccattaacccgtgtgactatgtactcaaaaggagaaatattcaaacatcttggcaacgactaactcctattatcaaatggcacgtttatattttgatgattgggcctggtgagaaggaagcaggaaggaatctaggcatatttgtaagatacatacataccagagggaagaaataaatcttataataattcatgggcctttcaccttggtgaaatttccacaagttcactgatgtaggcctattgagctatcccttctgggtgtagggcaagtagaatatagcccttcctacgatcaaaaaatagcgtcacaacgcctagtggaccactggggctattgtatgctacttattcctcattgaggcgtgctactttgcctattttgtgtgacctgaaaacattttgactcatccaagataagtctgtgcaatgtgtcccagctgctatgtaagtttctctgccatcaggaccctatgacccagaaaagccaaaagtgattaaaatgttaatgaaagatagtgatggttgagcctttggctggccctagttagtaaatcagcactttacaaggctgaggtgggagaatcgcttgagcccaggacttcaagacaagccttggcaacatagcaagaccttgttctaaaaaaaaaaattgaggcgaacagaccaaaaactcaacataaaaatgggtaatagatttgaacaatttacaaaaagaaaaataatattgacacaggaaatatgcaaaaatgttctatgttatttaaaaaacaagaaatataaattaaaactaaatttaaatacacttcttaccatttgattggcaaaactttaaaaatgttgtaataacacattttgttagctagtttcaaggcaagagtatatttatacattacttctgcaaatggaaatggtaccaaaaaattaaggcaacttgacaatatgcaacaaaatttctattaatatcttcacttttcaatcctgctttctgggatgtactcttctgatgtatcttcaacagggataatatacaaatgtacaagtgtatttataacagcatcatttgtaataataaaatattggaagtcactgaaatgtccataaattgcagcactgttatataaaccactcaatggaatttatgcagttttaaaaataaattactccatatgacatgatttccaagatgttattatgtgaatatagaagaattagaagtgtactatcctaacatttaagtaaaaaggaaaaataagaaacacatctattctgttaaaaaaaagtggtaatgaaaataataaaattagttacataaaggtgttaggtggcaacactgtggaattggtttaggggtaggaaggaggggagtggcacttctctgagaataatatgtggtagagcattgactcatgggaacatgttgatgactgacatacccaataatataaaatcaagaatgagatttctttgtagataaactaggaaagtgaaaatcatagaataacaaattaacctaaatgtatttcaaatcaataacataaacagtctaaaggtgacagcaagaagtaatttaagcaacttattaaacagtacagtgtttgactatatatcctcagtctaaagacaaaaagaactataaaaaatgttgaactctacttttgcattgttttttacaatgatatgaattagtaactctgacactgcatgatgcgtatgcaatggtcttaatgtttgtggcccaccaaaatccatatattgtaatttttaccctcaatgtgatggtaataggaggtggggcctttggagggtgattaggtcacgggatgaatacccttataaaaaatgccagaaggagcttgtttgtcacttcaaccaaatgaagacacagcaatatggtgctaactatgaacaagaaagtggccaactacctgacacaaaatctgccagtgctttgatcttggatcccagtttcca[138 bp omitted]cctcttctctaccaaaaatacaaaaaaattagccgggcatggtggcgagcacctgtagtcccagctactcgggaggctgagacagaagaatggcatgaacctgggaggcagagcttgcagtgagccgagatcgcgccactgcactctagcctgggcgacagagcaagactccgtctcaaaaataaaataaaataaaataaaataaaataaaataaaataaaataaaataaaataaaagccaggcaggctatgatattttgtgactaaaaaatattggtactgagaggtgggcttgctgctgcaacaaatacctaaaaatgtagcagtctttggaactatgtaatggatagagtctagaagagtttttacatgtatgctaggaaaagcctacattgccatgaatggactgataaggacaattctggttagcgctcagaaatagagaataagaactgtagagaaaacatcaatcttgttagagcatacctaggtagtcatgatcagaatgttggtagaaatatggacagtaaaggccattctgaagacctcagtcagaaatgttgaacatgttattggaagagaagagagcttcttgttataaagggacaaagaatttggctgaattatattcaggtgctagtgttttatggaaggtagaatttgtgaatgatataattgtttatctgaattaatttctaatcaaagtgttgaagttgcttgaatcatcttgactacccgtagtgaaaggcacgaagtgaggaatgactgaaataattattaattaaaagggaaacagaactaaaatttttaaaagtttacagcctatctactttggaaaaaaaaaaaaacaggaaacctgaagaatacaagggtatggttaagcaactaactaattcatgaatttagtatggattggccatgtcaactgaagccaggacctattgtccaagacaatggaagaatgaccccaaaggcatttcacagattatggcagcttctcctcccatcacaggcccagagtgcaaggacctgggggacagaaagggcctttgatgccagatataccctaatatattaggcacagtttcctgcctactacgattgagcgtgtcaataaatttttatctcttgggagggcagaacagagcaaggatacagctgtaactggtttagaaatagcagtcactcaattttcagagaagtgttcctcatactgtggttggcacagtcactttatctaaagaaaaccatgaaaagtattcttttttagtttagaaaaattgatatagaacatgagactccatttttttaaaataaaaatataggttgataggccagaattcacaggtccacctgcctgagccaaaattctcacgcctccacagagcaaatggactccatttcccaagataccagcgaaacgcctgcgggagtctaattgcccggtcgatgcgcaggaaatttggctcccgcaggcgtttcgcgagtagcttgggaggcgtgggaattttggcccaggcaggaggacctgtgaattctgggaagtggagtccatttgctctgtggagtcgtgggaactttggctcaggcaggcggattcgggggattctgggaagtgtagtccagacgcctgtggcatcatcgacacttccggtctccgagcaggacactgctacttaacaaggtggtttgagccaagtatgtgtcttgcgggtctttgcgaaagtgaaccagttattaggggcgcctaacgacctggggggtcaactaagggggtaagaagccctggagaagacctgaggtttggagatgcgaggggtgggagggaagtttcgttgccgtcgatggagccttctggcgttgggggctgtactcaggtccaccggaggagtcgtcgggggttcggggggggcggggaagaactctgtctagtcttgtgtgcctgtttagagggttttccaggtgtttgacctcgttcagtccgcctccctccactcttaagtgtgcgacctctttctcgcgatataacgtggggtgttacttaatctccctgtacctcccattgccgttttttaaatgaggatttcaggaccatcctgatagaattgttttaggagttgaaagttgtggtataaaacaaagacttaacagctcctgtcacttggtgtcctgttaatttcccgcgaagtggtcaggtgcccgggtggggtcagagctccagctgctccggcccttctcttggagcccggcagggctctggatgatcccggacgcctctgacctctttttaggaaggcgtgggttgcatccacgtttcacgaagggagaggagcatttaacttgtatccgggacggcgacgcagagtgtttgacagctttctccttccccagcctgacttttctaaaagagctgcagggagggacttggctactgaggacaaagctgtctacacgagtggtctttggcttttctctttttaaaaaaaagttatttattttgttagtctgtttttattattgttattatttgagaatgaggtttgctctgtctcccaggctggagtgcagcagtggcgcgatcttggctcactgcaacctccgcctcctgggttcaagcgattctctgtcct[134 bp omitted]cggcctcccaaagtgctggaattacaggtgtgagccaccgcgccgggccggttttttcttttacagagatgttcacctcaaccaagagtgtataggatgtgtccttgggcatgggtgttgataataattaaaccttaattggtaacttaattctaagggctttatggaaataaatacatttacgccacaccatggctctgtggaaaggtattgctctttttcttttttttttttttttttttttcctgagacggagtctcgctctgtcgcccaggctagagtgcagtggcgcgatctgggctcagtgcaataggccgcctcccaggttcaggcgattctcctgcttcagcctcctaagtagctgggattacaggtgcgcaccaccacgcccagctaatttttgtatttttagtaaagatggggtttcaccgttttggtcaggctggtctgaaactcctgacctcgtgatccgaccgccttggcctccgaaaatgctgggattacaggcgtgagccaccgcgcccggtcgctcttttccattttaaatatgggagtgagacacctggtgcttagttcccagtagaatgaggtacagctggagctggaacctaggcagtttgggtcagagcctgagttgatcatcccttggatacattttcattgaggtagaggaactagctggaatcaggtggggaaagagagttaggacttgattgaagggaccttgagagcaaggctcatagacttggacttctgtaggagtcttttaaaaatttgtcaacatcctgtttcactttttataaggattttgtattgtggaaccatatcattgtggagcattttaaaattagattaataggaggagaaaacatgttttaaattacccatgaatccaagatgtgaaggtgctaactgtctgatacaagagatggaacttccagttctcctccgtttctttttagtctttctctgtgtctattgtatatttatttataagcatttaaaaaaattgttataatatcttaatgtgttttcccatatttctttaactatggaaatttttaaatactgctaatagagaataaactagtaaactgccatattatgtcatgctcatccaatattattcccatttgtgtttttttttttttttttttagacggagtctcgctctgtcacctaggctggagtgcagtggtgcgatctcggctcactgtgagctccgcctcccgggttcacaccattctcctgccccagcctcctgagtagctgggactacaggtgccggccaccatgcccggctatttttttgtatatttagtagagacgaggtttcactgtgttagccaggatggtctcgatctcctgaccttgtgatccgcccacctcggcctcccaaagtgctgagattacaggtgtgagccacggcgcccagcccccattgttatcatccttatgactatttcctgatagttgaaaacctttcatttttatatcatttcaaagctgtagaagagttgcaaaaatagtataaggaattctcatatactctttacccaaatttgccgattgtttacatttttcctgtttgctttgttggtggccatcagccaaatactaccaggaacatatctgtaaccagagacgattgtagatttctgcagcaaggaagcccacattccatggtgatcatggggtgacttggtaagaggtgtttagaaagggcaggttatagggtctcacgtaacatgctagacaatattaagatatcatattaaatgatatttattaaatattagatatctgtttaaaaaactactaattgtgcttatagtgttataattagatagtgctagatagcatattccataacatcatgttatctcatatgtggttccataattaaatttgttcaattttttcatttatagtcctcacaactatcttctaccctaccctttaccctgaccccagtttaaagtctaattatatgcattgtgtttactcgtcacatttctgtcttctttaatctggaaggatttcacagcctttttctttaatatatgtggtatttttaaagagtgtaggcaagttattttggagaaagacgttcattgggatttatctgatatatctcatgtttaggttcagatcatgcattgttattgcttctgggccttatgcattgttggtgcggatactgccaaagtgataaggtttccttcctattgtaacataacagggccaaacgatgttggtttggcccttcattggtgatctcaacttcattcatttggccaagatgatgtctttcagatttgtccactatcaaattacctttttaaaagaaatagtcaagtttcttctggggagatacattattaatgggcattcactctaaaaatgaactgccagttctcccccatttatttattagtttcttcaactataaatattctatcagtatggactcagtcttgttaagttaaatgacatgtaaactaacaattatttttcccaattctattgaggtattttttacgtatcatagcattcaccaatttcaggtgtacaattcagtgatcttcaggaatttcacatagtggttttgccatcatcatgattcagtttagaccattttcatcccctaactggacttcttgtgcccacttacagttaaaactcattttcaggccgggcacagtggctcatgcctgtaatctcagcactttgggaggccaaggtgggaggtatagcttgagctcaggagtttgagaccagcttggacaacatagcaagaccccatctcttaaaaaataaaaactcattctcacctcaaatctggagcaaccactaacttatattctctctatataccattatctattctggatggttcatataaatgggatcgtataatccatgggttttgtgattggcttctttcatttagcatgatgtttccaagctttggaaacatcctttaaatttccaaataagattccatggtatggatacaccaccatttgcctatccatttacccagaggaaggcatcttggttgtgtgcagtttgggtttattatgaataatgctgctgtgatcattcatgggctaattcacaacacacatctctctttttctgcagactgtggcacgtttcaggcaggattcctccttcattcaaactgcatcacccaggagtctgcaaattccccaaagtaggaggaaaaatgaccacattcaaggtgaggggggcgtgcctctctcgctgttaaaattccatgtcactactcatattttcatgtgtttttctctgtcatgagaagactcaaggggaaaacaggcatttggggacctgtttgtgccaggtgcttcctttatctcttttgtgttgactgcatttggtttttggttttgctttgttttgttttgttaccattatttattttatggagtatgaaaattagtagaaatgaacagtgctcccacttccttacctcccctctctcaaattatctgtttttatcttctctgctgttcgtcatgtacatttgtaactgtatttgtattgatgatatacatctaattgtaaactgtgctctttttatatgttatataatcttccatttttatggttacatcatattcctattacattgatgtatctttttatttataactacctcacgctcatagacatattttaagcaacactgcagtgacagctttcctatacataaccttttcccacaaaattaattttgaaaaccatatgccattttagctcaattttgaaagggtacttttgatatgtaccacattggctgttttgcagatagaatattttaactaggcacagaacaaaaggatgtaactgctgcaccacacaaatattgttggagttttcacactggaagagctagattctgtgttctccttgtctcagtcatactttgcatgtgctttatttactggtctcttcttattcatttatgtagtaagcagtttaaccaaagcagtagaaagccttcatttaaaatgtccagtgatactaagttttgccaatcacttgtgttctgttactacatttactcctcagcgcagcggaatgaggttcctggtctcttcttcttcttgaacaggtgaaatatgagaaaccttctcaggtgtacacaggcaaccaaaggtcaggagtgttagccattcggctcaggtgaaaaagagaaacaaggagagagacagaattctccattgagcaacctgtgccctgtgatgtggatgtctggagtgccctgtggagtgatggtgtccctagtggtgctgctcctccctgtccctacttggtgtgacttcttgtcacatgtcactatgacatggcatctactccaggcactgaagtatactgattaccatagttgttatagaaaatctttaaatcccttttggcaaaagatgcctcacacaatgttaccagaagaaataatgacctggggcagaaatgttagccacgtggatacctaaagaaaataaaattcaaaatcaaaaccttgagcacagaataaaggaaaaactccaaacagataggaacaaaggacactaaaaggccaatgtaaaaggagaagtagagatggccaataaccttgaaaagtgatggttttcatttgtaatcaaataagtgagaataatagaatgatttgttccccaaatcagattaccaagactgtgggaatacttataacctgctcttggtcatgataaagagaagcaaagtacttgtattctgttcaaagattatggaggtaggtaaaaaactgggaagaaagcatgcagttatatgatcacagttctaaatgtgcttattttttgatgttttaattttcatttgaaattattattttaaacaatgagagagtaagatgttcttacatcttgctacatcattacttaatgatgctctttacaggattgataatggaaaatatgtaaaattaaatattctttactgtagctaaaagtaggtcatcagatctctggaatactatgcagccatgaaatagataatgctagtaacaacagtaaaaaagattccagctaatgttcattaaacagtggcacagatgtttccaaatgctatgtatttccttgtttaatcctttaaaatactgtgccaaataaggactattatttagagaggaaagtaaatcctgtaggcaaacatgtctaaggccacacagttaggaaggggcagacccttaggatgtacagtgatgcattctggcttctgatcaggacactgaaggctgcaattaacatttgtggtttgtaccttgagagtagaggacacactacataactgtcccactcagctgtccacactggtactgtggagtaggttcactgtgcactgattaccaacttgtgtgagtcctgtgagacagaacacgatctcactcaacagattacgtgaagcagatttgttatctacaaattggcagcaagggagcacaggagtgtaggatacactgtgaggtggccatccaaggctgaagaaaacgtcctggggtgggtagaatcttgaccccatttccaccagagcagaggtaccccagaaggcagcccacccgaggttatatacctccggggcaatacgacttactgggcactttctccctaactcaagacattatcttccctaggaaggacaggaacattgcattgctagcatgttctatgtttattcttcaaaactatacacaagaaagaatgattcaaggccaccctgaaaattacccacagttacctaaaacttgttagtttagcaaatactaaagaaaagcaatagcatccagggtttgagtacgagagaggaggacccaacaaagttgggactgaattgtttaatgttgctggggcagttggcaagatgtgtcgaacctatatatgggtagctcaggatgcagcatgtagagtcctagagggttacatacaagtagactcaatgagtgcacagaataaatgtatgagacttcatcattgcacttctggtggagttcaggaaaatcagtatgtgtcattgtcaggatatagacagaatgagtgggaaatctctaagttgacctacatccctcaatactgagaacaactttccactcatccccttcccctgctcaatgccgcttctcccccagtagtccttggtcataagattgaagttatgtcttcttgatgttgtaggaggcagtgaccttcaaggatgtggctgtggtcttcactgaggaggagctggggctgctggaccctgcccagaggaagctgtaccgagatgtgatgctggagaacttcaggaacctgctctcagtgggtgagcacgggcatcttttgtgtctgaacatcaggcctcaggagtggttttgtaccttagagtgttcaagtttgagtgtgcattgggaacctaaatagccagtaaattttgcctaaatattacccagaatgtgttgggattcagcacgtgaccttacctattcacagggcatcaaccgttccaccaagatacttgccacttcctaagggaagaaaagttttggatgatggggacagcaacccaaagagaagggaattcaggtaagaactaagcatctgtgtgtccttgtacctgactctcccacctgttgtgcttctgtccatgcccatttgcattgctctgatgtaaatgaccacatctccttcctggattattacaactgccttccagttggtggccctgttcccaccctaatatctgttctcatggcagccaaagcgatccttaggaaatggaagtcagattgtcattcctctcctcaaaagcttttataacttcttatttttattgatgttacaacctctttaagtgcatcttagagacctatgtggtctgctcttcatcccattctgcctctctgactacgtgtgtcctttccatctttctccatcatttccagccacatttcttccctgctgtttctgtcctgccaaggacactgtattgcctgttgtggtaaccaatgaccacaaacttagtggactaaacaaaaatatttattatctctctgttctttaggcctgaagtttgatacatttcactgggcaaaaatcaaagcgtccctagggctttgtttctgcctgaatgttcttggagggaaaacttcactttggtttaccagtgtctaggcactgtccacactccctggctcttgtttcacgtctccatcttcgaaggcagctactttgcatctctgaccattcttccataatcccattccctctgccactcttcctaagcctctgccttctacctttcaggtcccttgtgattgcattggtcactcctgcataaaccaggatgatcttcctaccttctgcttaggtgactagtgaccgttatggcgtctgccgttttaatcccccttgctgtgtaacataataggaaggctgactgtatattgcagaacagtttttttggcctgctgatggctgcttatccaattctgactttcttaggttccttgacatgattggtttcaggtgtgtacaattgacccacgtcccgtggaaacttctaagcattgtttttatgaccacactgagtaagatgccttccctgagacttatcctggagctttccatagggagcatatttatatctgggaagaaattctttttgaatgaggatttccagctacatttcctttgaaagatttacccatctgcagcccatttgccttttccaaagtctatatacacttcactggccccagcttcctccttcgtactagaagggggaagaatgaggatgaggggacacaagtcatgtagctgaacatttactctatttctggtcctctttcttcataaatgtgtctatttctgcatctttatgtcatacaagttttgttttcaaaaacattaaaggatatagattttacacaattttttcttgatttttatagatttagtgctgtattttgaactggtgaactttatgacctgttaggaattgggaaactgccctctaaaactagaaacatcctgaagattctcctttctccttaaagatttcttattaatttaatttatttttgagatgcagtttcgctcgtcacccagcctggagtgcaatggtgcaatctcggctcacagcgacctccgcctcccaggttcaagtgattctcctgcctcaccctcataagtagctggaattacaggtgcccaccaccacacccagctaatttttgtatttttagtaga[141 bp omitted]tattaaatatatctacgtaccactgtataccaataggtacacacttacctataaatcctttccaagattcaacctctgcaacttaactttccattggaagaatttacttaattcaggacttggtattatcctgacaaagttttgaatgttttgcaagcatgagccatagtaagaagcacatatttcaatataacccggacaaacatttttcatgcctgtagatgtgtatgagtgactctaggaggcatttcatggaatgaccactttcctgcttgtcatgatgctgtgataatttacattccagttcttttttgtaaatgtttattgcagagtttaactgtatttcatagctcactaatgtgtagtcttcaatataaaaagttataaagtcctatttatctgcatcataggctttcttttcatttcatgtgattcttcacatttttgattgtctgctcaggagcatccccctttgtggacccctggaaggacagcctttcagattcccctcaaaactgtagttgtgtgtctctgtactccttcagataaccaagttactctccacatcaatacagaaaagtaagatgaagtattttacatatgctgtgcaaaattcttgtgcagggatactttgaatgtgtacatagaaacactatgaagtgtttgatgtttaatgttgtgcagagttcaaccaactacaaaatttactgagacattttacagagaactgctctcacttcacaccaagtgcaaattcaggaggttttcaaaactgcctttgcattcaataattttctaaactctcagaactcactgaatacttttattctcactgactgatttttacagggaaaacatgtatattatacttagagaaaaaccaaataaaacagggtccagatgagaataaccaaatgcggaccttctattgtattctcctggcagagtaggatgtgttacattcccaggattaaggtatgacttagactcaaagtactgtcagtcacagaaactcacctaagtgctgggatccagagtaattattgggtctccattatggagccagtattgattgatgattcctaggtggttaatcagtctcctagtccactaactctctgtgacctaaagctccaccttaaatcacattgcttatttctgacatggagaggagcatctcccactcccaatcccccaaaggatttgccagttgcaaccataaattatattgtttcactatgcagagtgatccagtgattgccttcaagccaaccaagacactctcctgaggtatgacacttcaggatcctagagattacctctcagatgctgaggacaaagtcccaacctctttttggttaggttaactttttttttttttttgaggcagagtctcgctctatctcccaggttggagtgcagtggcacgatctcaatctcagctcactgcaacctctgccttccaggtttaagcaattctcctgcctcagcctcctgagtagctgggactacaggcatgtgccaccacacgtggctaatttttgtatttttagcagagacggggtttcaaggccaggctggtcttgaactcctgacctcaagtgatctgcccacttcagcctcccaaaatgctgggattacaggtgtgagccactgcatccagcacttttttttttttttttttttgagacagggtctcgctctgtcacccagggctcactgcaacttccacctcccaggctcaagcaattcttccacctcagcttcccaagtagctgggactacagagtgcacgaccacacctggctaatttatgtatttttagtagggacagggttttgctatattgcccaggctggtctcgaactgctggactccagtgatcaatcccaaagtgctgggattaaaggcttgagccaccgcacctggcctagtttaacttctttataaggatatacagcataaacacaaatatacaaagtgttgattaagttattgcttttccttaaagttccttttgattcatatttcattatgtacataaatttttattttcataatttatcatgcaagattttggactgactaggaaattcattacaaatagtaacaagttaaatgtatatcatatttttaaattaagtctattatttctatcaaggatttcacatgtgagacatgatgtggttctgaattggcctcatgcaaaccagaaatcagggtgtacttggaaaacaaactgaacattctctgtattcattaaagtttaatgtcatgtcctaagtgtgaaaccttgagatcactgaataaaggcttcacctgtacacatctcttaaatctgtgtctttataggaggcaagatccaaactgagttggagtctgttccagaagcaggagcacatgaagagtggtcctgccagcaaatctgggaacaaattgcaaaagacttaaccaggtctcaggactctatcataaataactctcagttctttgaaaatggtgatgtcccctcccaggttgaagcaggactacccacaattcatacaggacagaaaccttcccagggtgggaagtgtaaacagtccatcagtgatgttcccatctttgatcttcctcagcagttatactcagaagagaagtcttatacatgtgatgagtgtggaaaaagcatctgttacatctcagctcttcatgttcatcagagagtccacgtgggagagaaactctttatgtgtgatgtgtgtggcaaggaatttagtcaaagctcacatctgcaaactcatcagagagtccacactggagagaaaccattcaaatgtgagcaatgtgggaaaggtttcagtcgtagatcagcacttaatgttcatcgtaaattacacacaggagagaaaccttacatttgtgaggcatgtgggaaggccttcattcatgattcccagcttaaggaacataagagaatccatactggggagaaaccattcaaatgtgatatatgtggtaagaccttctattttaggtcaagacttaagagccattccatggttcacacaggagaaaaaccatttaggtgtgatacatgtgataagagctttcatcagagatcagcacttaataggcattgcatggtccacacaggagagaaaccgtacagatgtgagcagtgtggaaaaggctttattggtaggctagatttttataagcatcaggtggtccacacaggagaaaaaccatataattgtaaagaatgtgggaagagcttcagatggtcctcatgccttttgaaccatcagcgagtccacagtggagaaaaaagcttcaaatgtgaagaatgtggaaagggattttatacaaattcacaactgtcttcccatcagagatcccacagtggtgaaaagccatataaatgtgaggagtgtgggaagggctatgttactaagtttaatcttgacttgcaccagagggtccacacgggagagagaccttataattgtaaggaatgtgggaagaactttagccgggcctcaagtattttgaatcataagagactccactgccagaaaaaaccattcaaatgtgaggactgtggaaagaggcttgtacacaggacataccgtaaagaccagccgagagactatagtggggaaaacccatccaaatgtgaggattgtgggagacgctacaagaggcgcttgaatctggatatacttttatcattatttctaaatgacacataattgttcatatttatggggtacaacgtgctattttaatgtgtgcatacaatttatagtgatccaatcagtgtaattggtgtatctgttacctcaaacatttaccatttctttgtgttggaaaattcaaaatccatttgagaggagttggtagacagcaagggaagggtccctggagacccccagccaaacgggtcagtgtctcatccccacataacacaaaaagcagcctggggaagacaatcaagctacaggcactgataagggaactagcacaggggattgtgcctggagacatgcccatggctgcacagatagaagaacctccagcccattcaggtaaaaactcgcacaaacctccggctcactcagttaagggaacaagaccagacacagaaatgcctttgtcctttgtataatcagcaggctccgaggaaaaagtttcttcttttgtgggcatgaacacagtgggcttcagtaggttcaggttggcactttcttttgtggaaaaggaaaagcccagcctctgtaaatcatcacttcagctcctgattggtcccaggccaagctgaatagcccttaggaataatcacttcaactcctgattggtcccgggccaagctgaatagcccttatgaatcatcacttcggttcctgattggtcccgggccaaggtcccagaccaagctgaatcacgctttctccaagacagcccgcaggctaagtgcattccttccccttcccagtccataaaaaccccggaccccagcctcatactgggcaacttatttggatccccatctccactgtggagagcttttttctttcacttattaaacttttactccaatttcacccttgtgtctgtgcttcttaatcatattggacgtgagattaagaactccgggggataagagagactgttacagagagactgttacagtgtggtgcatttgtgagactacaacacatttttagcaatttgtaaataattgttgatgatagtcacctttagtgctgcagaacagtagaacttattcttcccctctacctcttttgtatctgttggccaacctttggccatctcacctacctcctacacttccttgcctgtctacatccactgttctactctctactacaaaatcaactttttttaacttccatatgagtgaggacagtcagtatttctctttctttgcttggcttatattaacaatgtccttgaaaactcatccatgttgccacaaatgataaaattttgtttccttgttatgtctaaagaggattccattgtgtatatatgccaccttttcttcattcatgtattgatagacacttaggtggattccttatcttgactattgtgagtagtgctacaatgaacctgggagtgcagatatctccgtgacatactaatttcctttcctttggatatacccagtaatagaattgctggatcacttgaattttattatgcttcagaagctccacacgggagagaaactacggaagtatgaggagggtggtatgtgcttcattcaggcctcaagtcttcaacttcagaatgtccacattggagagaagcctcagtaatgtgtgtaataaagtctttactcagttttcatgactacagtctcacctaagcattcacaaaggggagaaacattaaaatatgaggcacatagaaagcagttccttttgagtttgtatcttgtaatttatcacagaatccatgctgatgatacatttcatccagtcctgtaggagaaaaaacatttaagttaaagcctgtttcagccatagctcagcataccccagtggtcctgggactgtcacagtggagaacccttgtaagttgtgcagtagggcttcaaacaaaagtttgacagttacagttattcaggagacagaccttaagagttcattcatgcatttacaaaacgaatcatgaacatatcaaagttgattaccactagaatgtcagtgacatgtgttttctgctgcatcttcacaactttaacactgattatcactttgtgttcactatgtgttaaatgaattaaaaggagcaaacgcgatgtttttaaattgtatctaagagaggaaatctacaaataattcagggacacctgagttgaaatgcagagtacactaaatactgcagttcacagcattattttgataatatctgttcacacttggttcctgtcttcccctcctcctctattccgaagttgcattcttagtatttgtggctttgtgtagtgttccattggttgaatacaatataaattcaacaataatttgtaatttttctcacactacaggctgaaaacgttgtaataaattcaataaaacatcttaataaattcaaaagtttaataccataaaagtcttttccaattataatctagatcacaaaagctgaaattcaatcacatcatgaaaagtggaaaattcacaagtatgtggaaactaaacacactctttatatatatatgtgtatatatatgtatgtatatatatgtatatgtatgtgtatatatatgtatgtatatatatgtatatatgtatgtgtgtgtgtatatatatatatatatatatatatatatatatatatatatacccaccctgtgtccaagtgttctcattgttcaattcccacctatgagtgagaacatgcggtgtttggttttctgtccttgtgatagtttgctcagaatgatggtttccagcttcatccatgtccatacaaaggacatgaacccatcttttttaatggctgcatagtattccatggtgtatatgtgccacattttcttaatccagtctatcattggtggacatttgggttggttccaagtctttgctattgtgaatagtgccacaataaacatacgtgtgcatgcagcacactcttaaataatatgtcagagtacatcaggagtgaaattaggaaataccttagacaactgaaaatgaaaacaatggccaaaacttttggaatgaggcaaaagcagtaggaggagggaaatttatatctgtaaatgcttatattaaagaagaaagatctgacatccacagcctaattttattttcatgaactagaaaaggagaatcttacagaaagtgattaggagggaaataataaagattaaagtattaataaataaaatacagaagaagaatacaaagaaaatcaaccaaaccaagagttgattattctgaaagactaacaaaattgtgaaaactttagcaggactgactaaaaaagactcaagtaactaaaagtggggacattattacccatttttacagaggtgagccacagcgcccagcttcatttttgtataaggtgtaaggaaggggaccagtttcaatcttctgcatatggctagccagttatcccagcagcacttattgaatagggagtcctttccctgttgtttttgtcagtgtcatcaatggcatggtttggatgtgtccccacccaaatctcagcttgaattgtatctcccagaattcccacatgtgggagggacaccacagaaagtcagaattattaattaaaagggaaacagaactaagaattttaaaaattcacagcctatctactttggaaaaaaaaattagaaaacctgttctggataaaacaacggtagagataagcaactgatttaggagattagtttggattggtcatgtcaacagaagccaggacctgctgtccattaacactggaagaatgaccccaaaggcatctaggagatcatagaggctgctcctcccaacacagacccagagtgcacggacctgggaagcagaagggacctttgatgccaagtgcccctaaccttttaggctcagttccctgcatgctacgattgagtgtgtcaatacatcttatctttcgggaaggcagagtagatcaaggatacagctataactggcatatgaatagtgatcactcaattttcagagagcggatgtttggcatcaaaagtttggcacagtcaccttatttttgtgtctaaacaaaattttgaaaagtttttagtttagaaaaataggtaaacagtagactccattttttttaaaaagaagaatattggtttataggccaatgtatgtttatagggagaaaaaaagttaccttcaaaagagcaggtttttagatgaattgtttcctaatttagctttatactgttattattttttaaccaatgccagtttttaaattgctaactataataaagaaattatgtttcaccaagaaataagaagaaacttaaaaaaaaaaatctttaattattgaggtatctgttgcctaggctggagggcagtggtggcatcatagctcactgcagcctcaatcaaactcctgggcttcagcaatcctcccacctcagcctcctgagtacttggaacttgtagtcccaagatcaggccaccatgcctggccagttaaaaaaaaatttttatagagacgaagtctccctgtatttccctgtctggtctccaattcctgagctcaagggaacgtcctgccctggcctcccaaagggttggcattacaggtttgagccactgcgcttggccaggaagaaaactctttataagacatgctccttcacctatagaatcctcccgttttactgcatttacaatctcaatgtaagattgataccaatgcctagctcttcatcagtcattattgctctgaggtactgagcaattcactacattcgctgaaatttgatgtttctacatctaaggagaaatatgaataccatgaaaagtttatgggaagatagctattccatgacgacaccgcttctccactagtagctgtgatcttaaatgggggtggcttttcctgccaaaccagtggtcccacagcttctggagtaggggctggtgtcttcctgctcctcattgcccctgccaaaccattccacctggctcatcctttaaaccgttagttttaacctcccatcgtcagattatcctaatccttgaagattttatctcctcgtttgttctcttcccaataacactcctgtcatcgtgggaggcgtttagacttcaggaattcctgtctatacactattttcgctcaaagactcaggaagagagacggacgactcacagggtcacagtccacattccccaccaggcgctcagagatatggaatacgttcccggtgggcactgcggtgtgtgtagtcaaggaccaccgcggagtccaacgcttcccgctgaagagtgagattatagacattttcctttggcattggaggaagcggagtccagacacactctgagtcgcgggcaagttggctcaggcgggtggacgagtgaattctgggaactgtagtccatcaacttcatggaatggcggaccctttggctcaagcagttgaaccggggaattctgggaagtggagtccagacgctctgtggagacgcgagcacttccggtgtgtgagcctgcggttgctacataaccgcgtagtttgagccatttctgcgtctggcgggtccttctgaacttgtcaccttcgcttggggtcgcaacgacccgatgatcgatgatccaagcaagggaaaagaagccttggcggagagcggaggtttggtgggggcggggaatggggtttttttcccgtccacggaagctttctgggatgggggtgctgtgctcgcatcccgggggttggaattggcggggtcctctgtgccctgctgtgagcgtttccaggactttgacctcgctcagcctgcctctctccaccctacctgtgcgaccgctttctcgcagtgtgacgtggagtgttactcaatgtccttatactttccattgctgtttttggtaatggggacattagaaccatcctagtagaatcgtttttgggaactgaaagagataacgcaaatgagaaccttaaagcagtccctgtcacttggtgactggtggtctcttgttaacttcccgaagaggtcaggtccccgggtggagtcatagcttcagctgcaggggccctggtccttctccctaatccctgcaggacgctggatgatcccgggaggccttctgacctctttttaggaaagcgagttgcgtccgcttccacgaagggcggggagcatttaacttttatgggggaccgcgatgcagtcagggtatttcacaactttcgccttccccagcctgacctttctaaaagagctgcagggaggggacttcttggctactgagggcaaatctctatgtgattggtccttggcttttttcctttatagagatgttcacccaaccgagagtgtgtcctcgggaatgggtgttgataatcattaagccgtaattggtaacttcattctaagtgctttatacaaataaatttaggccacactgtggctctgtgaagtattgcttttctttgttttaaaaatgagagtgagacacagggtgcatagcagccaactagtgagaggtagagctggggttggcacctaggcagtccaggtcagagcctgagttgatcacctcttggatacattctcattgaggcagaggaactagctggactcgtagggaaagcaagttaggacctgattgaaaggacgttgagagcaaggctcgtgggcttggacgtctaggaatttttaaaaatttctcaactattttgtttcatgttttccaagtatttcgtactgttgtggaactgtatcattgtggaaaagtctgaaataggagaaatgagagtagaaaaagttttttaattacccatgtatccaagatgtaaaggtagtaactgttaagcttctaattgatttcttttgtctttctttgtgtctacttctatatttgttgataaacatttttttaaaaattgttatattttaatgtgttttcccatatgtcttttaactatagaaaattttaaatattgctaatagagactaaactagtgaggctggttgtggtggctcatgcctataatcccagcactttgggaggccaaggcaggtggatcacttgaggtcagtagtttgagaccagcctggccaacatggtgaaaccccatctctaccaaaaatacaaatattagccgggcgtgatggcacgtgcctgtagtcccagctactctagaggctgaggcaggagaattgcttaaacccgggaggtggaggttgcagtgagccaagatcacgccactgcactccagcctgggcaacagagtgagactcaaaaaaaaaaaaaaaaaaaagaataaactagtgaactgccatattatataatgctcaattttattatt[184 bp omitted]ctgggcatggtggcaggcagttgtggtcccagctactccagaggctgaggcaggagaaaggcgtgagcccgggaggcggagcttgcagtgagcgagatcgcgccactgcactccagcctgggctagggagcgagactctgtctcaaaaaaaaaaaaattaaaaactaaaaacaaaataaaatattttcatctttatatcatttaaaagctatagaaaagttgcaaaaatagtataaggagttctcatactctatccaaatttgccaattgtttacatttttcctggttgctttgttgatgaccatcagccaaataccaccaggaacataactaaccagagacagctgattatggctttctgcagcaaggaagcccacataccatggtaaatgtggggtgtgttggtaagaggtatttaagaagggatggtatagggtttcacataacatgctagataatattagatattaaataatattgttatctattacatatcagatctgttaaaagactactagtagttgtagtgttactcattagatagtgttgaatagcatattacctaacatcctgttatctaatctgtagttacatatttaaatttgttcagtttttcatttaaagtcctatgccaggcacagtggctcatgcctgtaatcccagcattttgggaggcaacggcgggtggatctcctgaggtcaggagttcgagaccagcctggccaacatggtgacaccttgtctctactaaaaatatttttaaaagccgggtgtggtggcatgctcctgtaatccctgctacttgggaggctaaggcaagagaatcacctgaacccagcaggcggaggttgcagtgagctgagatcgcgccactgcactccagcatgggtgacagagcgagactctgtctcaaaaaataaaaaaataaagtccttatgactgtgtcccctaccccacccttcacctgcaatgccattcaaagtccagtttatgcattgtctttagttgtcacattccacagtttctttagtctagaaagattccacagtctttgtcttttataaacatggtggttttttttttaataggaaagttattttggagaaagatgttcatttggagtttgatatatttcatgtttagtttcagattatgtattgttggtaaggatattgcacaagtgatgaggtttcctctttattgcaacataacagggttcacatgatgtggtttgtcccttcactggtgatctcaactgtgttcacttggccaagatgatgcctttcagatttgtccgctgtaaagttaccttttttaaaaaaactcaagtttcttattggaaggtacattattagtgggcattctactaaagatgaacttctagttctcttcatttattcatttgtttgttcaagtataaatctcccaacaatatggactcagaattcagtcttatgaaggtaaatgacatgtggattagcaattttttttcaactctattgaggtatattttacataaagcattcactcatttcaggagtacagtgatctttaggaactttgtaaagtggagtaaccatcatcataattcagtttagttatttttcaccctcagttggactctgtgcccatttacaattaaacctcattctcaccccaaatctggagcaaccactaacctacttttcctctatgtatacatttgcctattcggacatttcatataaatggaatcatctaatccatggattttggtgactggcttctttctcttatgatgtttccaaggtttgtgcatgttgtagcatgggttggtacttcattccttttaatttccaaattagattccattatatggatatgccatgatttttctatccatttacccagaggaaggcattttggttgtgcacagttttggggttagtatgaataatgctgctgtgatcattcataatacatgtgcttgttgctacacagcctccccagccaccatttcatgtctctcttttgctgtctctggcattttccaggcacaattccaccttcctttgtgctccattactcaagacactgaagactccaaaaagtagtaggaaaaatgaccacattcaaggtgagtagagctcacctctcttgctattaaaattccatcttattgctcatattgtcatatatttttctctgtcttgggaagactcaaggaggaaatgggcatttgggacctgttgtgtgccagttgcttcctttgtctcttttgtgttgactttgcatttggtttttggtttgggttttgttttgttttttactgttacattatggagtagaaaaattagtaggaatgaacagtgctcccacttcttcacctccttgctctcaaattagcctgatttttcttcttgtgctgttccttgtacattcataactgtatttgtattgatgatggagttccttatgtcaagagtgctctatacaccaagataacatgtccttctggttttcttcatacttgtccatcagatagttagtccccctttctgtggaggcccacattgcgcatgttggctccatttctcttagatgctccagggaccctctgacccacttcacccacctcctgagtcctctggccccaggaatgagctattatttaaggtgtcgcaatcagcggatcacacaccaagctcctgtgtttccgtattctgtccttctgtctcaatccatgcagccagctcacatctgtggaggggtggcctgtgtcccgcttatcattctgtcttctttataaatcatcaagctgctgtccagcctgcgcccccaggctgccatcacagcactgggccaattgcccaggatataagtgctccccctttgccagtccagagttctgtcaaattggaccctgctggctgcaccaattccatggaacaggttcactagttacagacttggcgagtctaccatgagagagcacactcatgtatgacaaattacataaagcagatttattacatgtaggtagcaagggacaacagaagcctatgatccactgtgagccagtcctccaaggcttaagaaagctgcctagagtgggtggagtcacgactgcacttgccccatttgcaccatagctgaggcaccccaagaggcagcctgtcccaggctatatgcctcaggggtaacatgacttactgagcagttcctctctaactcaagatattatcttttatggattggactagaaccaaagaaggcataaaaaaaaataaaaagatgttatcttccctgggaaggacactgcataactagcacatttatggttattcttgagacctataaacaagaaagtggggagaatggatccaaggctactttgaaaatagttacctaaaacctgttagtttggcaaatactaaagaaaagtgatagcatccagggtttgggtctgagagaggaggacaataagcctcatcaaacaaggttgagactgaattgctcattgttgctggggcaactggggcaattggcaaaattcattgaaacctatataggtgtagcccaggatgcaccatttgaaatcctaaggggttacttacaaggagactcagtaagtgcacaaagtaaaaatacaggaggtctttttcatgattgcacttctggtggagctcaggaaaatcactgtcaggatacagacagaatgagtgggaaatctataagttgacctccacttctcctctccgcctgctcaatgctgctcctcccccagtagtccatggtcataggattgaggttatgtatccttgatgttataggaggcagtgaccttcaaggatgtggctgtgttcttcactgaggaggaactggggctactggaccctgcccagaggaagctgtaccaagacgtgatgcttgagaacttcacgaacctgctgtcagtgggtgagcacaggcaccctctgtaatggtacatcaggcctcaggagtggctttgtatcctagagtattcaagtttgtgtatgcagtgggaacttaaatttccagtaaattttaccttgatattacctagaatgaattggtattaagcacatgactttgcatgttcacagggcatcaaccattccaccctttccacttcctaagggaagaaaagttttggatgatggagacagcaacccaaagagaaggaaattcaggtaagaagcaagcaactgtgtgtccttgtacatgactttctttcccatttgttttacttctgaccatgcccacttatatcaccctgatctaaattgcccaatctctttcctggtttattacaacccctttctggctggtggtcctgttccctcccttccaccctgacatctattttcccccgagcagccaaaatgatccttgggaaatgcaagtcagttttccactccttggtccaaaagcctttatggtttattaatgttattaaagttacaacctctttattggcttttagagaccctgaggtttgttcttcatcccctgctgcctcttgactacatctgtcctctcgcccttgcatcatcttttccagccacgttgtcctccctgctgttactctgtcctgtcatggacactgtattccctgttgctggtaacaaataacagacttcacagattaaacaacacttttgttctttctgacatggggaggacggtctcccacccctcaccctcgaaaggagtggccagccacaaccctaaatcatattgtttcactatccagagtgatccagagttggcaccctaacaaacaaagacactgtcctcccgcatgatatgtcaggatcctagagattacctctcagatgctgaggacaaagttctgacttctttttacttagggtaacttctatataaggatatacaacataaacacagatatataaactattgattttgttattgtttttccttaaatttccttttgatttatatttcactatgaacataatgttttaatttagtaatttatcatgcaagatttttgactgaccagaaaattccttagaaatagtaacaaattaaatgtatatattatatcagttttttaatggagtctgttatttccatcaaggattttacatatgagacatggtgtggttataaattggtcacatacaaaccagaaaacaagattcatggggaaaacataaactgaacattcattaaagttgaatgccatatcctaagtgtgaaatcttaaaaacaccaaacaaaggcttcatttgtccacatctcttcattctgtgtccttataggcggcaagactattgcggaagcaggaccacatgaagactgcccttgccagcaaatctgggaacaaactgcaagtgacttaacccagtctcaagactccatcataaataattctcacttctttgaacaaggtgatgtcccctcccaggttgaggcaggactatctataattcatacaggacagaaaccttcacagaatgggaagtgtaaacagtccttcagtgatgttgccatctttgatcctcctcagcagttccactcaggagagaagtctcatacatgcaatgagtgtggaaaaagcttctgttacatctcagctcttcgtattcaccagagagttcacttgagagagaaactctctaagtgtgacatgcgtggtaaggaattcagtcagagctcatgtctgcaaactcgtgagagagtccacactggagagaaaccattcaaatgtgagcaatgtgggaaaggcttcagatgtagagcgatacttcaagttcactgcaaattacacacaggagagaaaccttatatttgtgagaaatgtgggagggccttcattcacgatttccagcttcagaaacatcagataattcatactggggagaagccgttcaaatgtgaaatatgtggtaagagcttctgccttaggtcaagtcttaataggcattgcatggtccacacagcagagaaactgtacaaatctgaggagtgtggaaaaggcttcactgatagcctagatttgcataagcatcagataattcacacaggacagaaaccgtacaattgtaaagaatgtgggaagagcttcagatggtcctcatatcttttgatccatcagcgaatccacagtggagaaaaaccatacagatgtgaggagtgtgggaagggctacattagtaagtcaggtcttaacttgcaccagagggtccatactggagagagaccttataattgtaaggaatgtgggaagagctttagccgggcttcaagtattttgaatcataagaaactccactgccggaaaaaacccttcaaatgtgaggattgtggaaagaggcttgtacaccggtctttctgtaaagaccaacaaggagaccacaatggagaaaactcatccaaatgtgaggactgtgggaagcgctacaagaggcgcttgaatctggatataattttatcattatttttaaatgatatgtaagttgtacatatatatgggatatggtatgaaattttaatatgtgtatataatacgtaatgatcaaattgatgtaattagtgtattaccttaaacaattaacatttctttgttttgggaaaattcaaaatccattgttctagcgatttgaaaagaaacaataaattattgttgattatagtcacctttggtgctttagaacactagaatgtatttctcctatctagcagtacttatgtatcttgttacccaatctttggctatctcacctaacccctacacttccctgcttctagaaccactgttttactcactaattctatgaaatcaacttttttagcttccatatgtgtgtgaggacagttagtatttatcttaccttgcttagcttatattgtttaacatgtcctccaaagctcatctatgttgccacaaatgacacaattttgttttctttttatgcccaaagagtattctattgtgtatatatgccaccttttcttcatttatctattgatggacacataggtgggttccatatcttaactattgtgaagaatagtgctccaatgaacatggtagtgtagatatctgatccacatactgatttcctttgctttggatatactcaatagtgggattgctagatcactcgaatcttatgcctcagaggcttgacacaagagcaaaactatggaagtgtggctagggtgatatggcttcataccacctcaggcctcaagtcctcaactgcaccagagtgtccacgttggacagaatccttagtaatgaggtgtgtgataaagtctctgctcagttgtctataatctcatttgagagttcacaaaggggcaaaacattaaaaagaggcatatggtaagcacttcagtgtgtgtttatatcataatttatcacagtccatactgataatatatttcatccaggcttgtaggacagaaaacatttgtttaagttaaattcagtgtttcaccatagctcagcattctcccatcatcctaggaccatcgtagtagagaactcttgtaaattgtgcagtagggttgcaaacagaacttacgcttgtcattcaggagacaggccttagaataagagtttgttcacacatttacaaaaccctaatgatgaacatgtcaaaagtggtgaccactagaatgtcaactacaggtaccttgttttctgcatcctcaggaccttaacactgattagcacttacatgtttagtatgtgttaaatgactcaaaaggagaaaatatgatattttaaaattgcatctaggagagaaaatctacaaaaaataattcagggacacgagttaaaatgcagaatacactcagttctgcaatccaaagcattattttgggtaatcttaccctgttgcacttggctgctggcttcccctcatcctctgttctgaagtttactactagtggctttgtctaatgctccattggttgcatacaatataaattcaacaatcatttgtaactcttctcacactacaggctgaaaatggtttgttaacttgtcaataacagtccactgcatatatcacaattacatttttttcaacagtgttaaggcaaaatttatagtaatactttttacgtggcagatgtagttacgttggaaaaaacttccttagttctgaattctcatgattgcttctgtatttccatgcaggccttgatataatggccttctaattgtggtagcatttattttatcaaacaactcaggtagaagctatgccaatttgacaatttttggaaacctaacctaatattctcttcctatctctatgaaataccaagagaaacctatcggagtttggtaatttcatgaaatgtatccatgattggggtaggagtgacatttacatgctcttctttattgttggcagtaaaaataagtcttttgtaagcagtgtatatcagaatgtataaggtacaagtgttttacctggaaatgatgggataggaaattatgattatgatgttaaaactgtgaaaagtagaaaaccacatggatgatatcaccccattttaaaatggaataagtattcaacaagaatttgtgtgaaatgcatttattcctataacataagaccaataaaatgagggaaccagacatacagtaaaaggagaaaaacataatgtgagctttgtgaaatctgactgtaaccttcataacataatcaaatatctttgtgtgtttctgggactttttaatgtgtatatacgtaatttgtgaacaactattctttcctctggcaatgaatatttgctggtatttttccattttataattttatgcattttttctcagtgaacatcagttttatcaaagcagtaaatttagtgcaataaatttgcaaacttattaacgttaatcacttacctaccaggactcagaatctcagaataaaattgctctatattgtcatatgatgtaagttcacaatgactaggg[136 bp omitted]cggtgaaaccccatctctactaaaaacacaaaaaattatccaggtggtggcgggcgcctgtagtcccagctactcgggaggctgaggcaggagaatggtgtgaacccaggaggcagagcttgcagtgagctgagatcatgccactgcactccagcctgagcaacagagtgagactctgtctcaaaaatatatatatattctctggtttttagaatatgcagataaagtgatgaagtctggttaactgtcttggtaattaaagcatgtgatgcttctttagggataagtcagggagtgtgcaaatactggagatcctgcccagtgcccagacacagctgatttatcgagacagagaattcacaatagcgaaagaatttaatacacatagaactggctaaatgggagacaagggttttattattactcaaatcagcctccttgaaaatttggaggctagggtttttcatagatagtttgacaggcagggggctagggaatgggtgctgctggttggctggggatgtgaaaaatggtccttgtgcattaagtccacttctgggtgggggccacaggaccagttgagtcaagagtcatgggtttaggtggggccatctggttgtcagaaatgcagaagcctgaaaagacatctcaaaaggccagtcttaggttctacaatagtggtgttatttactggagtaactggggaatttgcaaattttaagacctctggaataacagctggaaatcagaataatgactggtaatcctttacacatatatcttagaattcaggcccctctcatcctcgtaaactagtggggcctttcaatagtattacaaaggcagtttagtttgggggaagggctattaccatttaaattataaactaaattcctccccaagttagctgggcccacgcccaggaattactaccaagggcagtttggtggttaaaagcaagatggagttggttagatgagatctcttgcactgtcataatgttctcactgttataatttttacaaaggtgatttcagagattgaaatagatatacatatgtgtgaaggttgtttgttttttgtcttttaaagcaacagatcttcacctgaggtcaggagttcgaaaccagcctggccaacacggtgaaaccctgtctctactaaaaatacaaaaataaccgagtgtggtggcacatgcctgtaatcgcagctactcaagaggctgaggtgggagaatcacttgaaactaggaggcagaggttgcagtgagccagatcacgtcattgcactccagcctgggtaacgagcaaaactccatctcaaaaaattaaaaaaaaacaaacagatcctttgaaaaccagaggtgtatgggcagggaacatagtatgacagcagcagagcttctgttgctatggatccagttagaacaaagacctggtttggatgccaattcagagttatataccatggtgttgacaaaaagagtcaaactctataaaatataaagaggtttattctgagccaaatatgagtaaccaaggcccatgacaaggccataaaaggtcctgagaacatgtgcccaaagtggttgggttatagcttggttttatacattttagggggacagaagttacaggcagatatcagtcaatacaggtatacattgatttggtctggaaaggcgggacaactcaaagttggccatggaggtgcttccaggtcttgggtgggttcaaagattttctcattggcagttggttcaaagagttatctaaaggcctggaatcaatagaaaggagtgtctggattatgagaaagggttgtggagaccaaggtttttattatgcaaatgaagactccatggtaaatggtaaatgtctcttatcagttgaaaacagtgccagactcttcagttaattctctcctagagagagacctgggaaaggaagaggaatgtagattttacaaaatgaatatactaagcatgctagattctaatgagattgctctgatttgacaatattaaaggttttcttaataaattgacttccaatcttatctttaatgtctgtagtactcttgtgcactgaatattatttttttcattaaacacttttctgtagatcctgaggaaaagatacaaaaaaaatttgaaaaactcaaaaggcagtttcctgctgatgaacatctgtgggataattgattttaatggatttatagtgcatagactatagtccctatttaatcaagcactaatatagacattgtgatggtattttgtagacattcagcccataatcagttggctttgagtagggatattatgctaaataagggtaggcctgatcaatcacatgaagatccttcagaatagagctgaagcttctctgaatgaaaaaaatattgcatcttctggtggcatcttcctctcatgggttagagtcccatcttcacctttctggtggccagccatatgcattttggaattgcttagtgatatggtttggctctgtgtccccacccaaatctcatgttgaattgtgatcctgagtgttggaggtggggcctggtgggaggtgattggattatgggggctgtttctaatgatttagcatctatccccctagtgctgtctttttatggaattctgatgagatctgcttgttttaaaagtgtgtagcacctcctcctgctctcattctctcctgctctgccatggtaagacatgcttgcttccctttcactttccatcatgattgtaaatttcctaaggcctcctagccacgcttcctgtacggcctgtagaactgtgagtcgattaaacctcttttcttcataaattacccagtctcaggtagttcttttttttttttttttttttgagatgcagtcttgctttgtcacccaggctggagtgcagtggcacgatctcggctcactgcaacttctgcctcccaggttcgagctattctcctgcctcagcctcccgagtagttgggattacagatgtgtgccaccatgcccagactaatttttgtattcttagtagaaacggggtttctactatgttggacaggttggtctcgaactcctgacctcaggcgatccacctgccttggcctcccaaagtactgggattacaggtgtgagctcactgcacccagccaggtagctctttatagcagtgtgagaacagactaatagacttagccagttccaccgtgccaaagtagagttccttgcaataattgcttgtatatgtcatactgattctgtttctctggttgaatgctgaccaaaagacattttgccccacaagaacttctagaggaagagcaccctaaggatgagttttctaaattgattgtgttttctagaattggatttctactcttactaaatttaagagcactattgactttatttccagtgcaacatagggaactggttgtgaaaggcatggtgtgataatatgccaaatatcatactgaataatcctaatcaaatgcctattggaatgattctggtgaccatgaatttgttagtttaggacacagtagacaaacttatcagtatagtagtattttctggatgctcctagttgggcttcagaaattaggaaagaaggctgggc[137 bp omitted]ggtggcacgcacctgtagtcccagctacttgggtggctgaggtaggagaatggcatgagcccgggaggcagagcttgctgtgagccgagattacgccactgcactccagcctgggtgacagagcgagactccatctcaaaaaaaaaaaaaaaaaaaaaaaaagaaggaaagaaaaagatgaggtcaatcactatgcagggcttaactatgccttgttgatcttggtattcacagtaaataaattgatgggaaatctatgatactgtcactgggtttgtgttgtcagaagagttctattgcaggggaagagaactctaactgcaaccacctaacacagtcacagccctcaaatcaattccaagacatgtccagtttacaaatccacattcatttacataaaggggaggccaatgttagatgagtatgggccctgatacatttcagagttctccataggaaaccatgggcataaacctgtgactgagtacataaaaggagaaataatcactcttttgggcaatgactgaatccttattgtcaaatggcacattgatatgatgatcagacatggtgaggagaaagtaggaactacactaggcatattagtaagacacatacatgacagaaaggaagaataaatcctataaatattcatgggccttccactttggtgaaatttccataggttcactgatgtgggactattgagatatcccttctaagatataggacaagtagcatatggtacttcctacaaccaaacaaagtgtcacaatgtctagtggccctccttggctgctggatgctacttatgcctcgctgggatatgctactctgcctttttttgtctgacccaaaaacattttgcctcaactaagataccataaggctgtgtaatgtatcctggctgccatgtaagtttctctacccctaagacactgtggaccaggagatccaaaagtaattgaaatatcagtgacagagagtgatgtttggagccactggctggtcacatttgatgaatcaaaccacagatggataggattttgtagcaaagcccagtcatcctctacatatacttactctttctctttttggtagagacagggccttgctttgttgcccaggctggtcttgaactcctggcatcaagagattctcattcttcagcctcacaaagcaatgagtacaggtatgagcccccacccccagcctacttactcttctttggaaaagcagcctatgattttgctagtggtcttagcagagacagagcacttaaccatgacctaccaaattagcatgcgtgccaagctttccatcatgaattgggtgttgttggcccttccttgtctttaaattgtatgtgcacatcggtattccatttgtaagtggtatatgtatgattgggtttgagcaggctctgaagccacagataagtgtatctaaggcccatgacccctactcctactatgttatcttcagaatgagtgaacatgaagacaagtcctatgaattattgtgtcacagcagcaaaaagaaatgaagtgattaaaagtaaacaaagcctaaaggaccacatgtgcattataggtgtcctgggtagagagaaagaaagccaagagagattacttatagaaataaaagctgaaaacttctcaaatatgaaaaacacatcattctgtaaatccaagaagctcaatgcatttcaagtaagataaacccaaaggtacccaactgagacatgttatttaaaaattgttggaaaccaaagacaagcgaaaaatttgacagcagcaagtccaaagtgacttgtcatgtacaaagaaatctttaatgaagatgtcagcagatttctcagcaaacatctgagactagctgatatattctttgctaaaaacacatacacaccatacatacacacacacgtctattgagaattcaacattcagccaaactgtccttcaaacttgagagataaatctatgtgaatgggtagacaatatgtatagacataatatatgacatcagttgtacaaagtggggagaaggagaagctgtgaatgagtagtgtttttgcacgtgattgaagttaagctggtatccatggaaaacagtttgctacaactttagaatgttacatgtagaatgttacatgtaagtccatgaatcagaaatgttacatgtttctaactacagatactaatgaaacatacacaaagggaaatgagaagagattcaaaatgtatcactacagagaaagaaatcaacatcaaggaaggcagtaatggaggatatgaggcaaaagagccagaagacatatagaaacaaataaaatggtaagaccttccctatgaataattgatttaccataaatgaattaaacaccctaaccaaaagatgtagtttggtaaaatgattgaaaaaaacagtatccaagtgtatgctctgcacaagggatttgctttagatctaataacatgcatagacttaaagtgaaatgatgggaaagtttttccatatcaatagtaacaaaaagacagaaagagtggcagaaaagagtggcagagacaaagaaaaactatataatgctaaagggtgattccaccaagaagatatagcagttataaacatatgtgcaccacacatcagagctccaaattacatgaagcaaatacagaattaaagagagaaataggcagctccccagtaatacagttgacccttgaaccacatggatttgaacttcacaggtccaattatatgtggatttttttttagtgaaacacacattgaaaatacaatattcataggatgtgaaaacctaatatatggagggccaactttttgtatgcacaggttccataaacttgagtatgtgtggattttggtatatacagagctcctggaaacaatcgcccctgtaaactgaggaacaactgtagtaggacacttcatacctcactttcttttttaaaatttgtacttttattttagatacagtgggtatacgtgcaggtttgttacatgggtatattgcaccaagatagtgagcatagtatccaataggtagtttttcaacacacgccccacaccctacatcccccctctactagttcacagtgactattgttcacatgtttatgtccatgtgtgctcaatatttagctcccacttataagtgagaacatgcagtatttggttttctgttcctatgttaattcacttaggattatgtcctccagctccatccacgttactgcgaaggacatgatttcaattctttttttatggttgcatagcattccatggtgcttaacatacaagtgcatgtgtctttcggtataataatctatttttctttgggtatatatccagtaataggattgctgggttgaattgtagttccattttaagttctttgagaaatctgcaaactgctttttacagtgactgaactaatttacattcctatcaacagtgtataagcattccctgttttctacagccttgccagctgttgttttttgacttaatagccattctgactgctgtgagatggtgtctcattgtggttttgatttgcagttgtctaaaatggttagagatgatgagcatcttttcatatgtttgttggctgtgtgtatttcttcttttgggaactgtctgttcatgtcctttgcctattttttaatggtgttatttggtttttgcttgttgatttgtttcagttccttatagatgctggatattagacctttgttggatgcatagtttgtgaatatcttctccatgctgtaggctgtctgttacagtttcttttgctgtgcagaagctctttagtttaattagttcccacttgtcaacttttacttttcttgtaactgcttttgggggacttagccaaaaattctttgccaatgctgatgtcgagaagggtattttctgttattttcttgtaggatttttgtagtttggggtcttatacttaaatcttgaatccatcttgtgttaatttttgtgtatagtgaaaggtaagggtctagtttcattcttctgcatatggctagccagttatcccagcaccatttattgaatagagagtcctttccctgttgcttgtttttgttgcctttgtcaaagatcagatagttgtaggtgtgtggctttatttctgagttttctattttgtttcattggtttatatgtctgtatttgtgccagtaccatactgttttggttactgtaggcttacagtagtcagaaggttgatagtgtgatgcctctagctttgttctttttggtgaggattgctttggttattcaggctctttttttggttccatatgaattttatgagaccaatgtgctgcctactccactaaggagtcaactccatatgaattttataatagttttttataattctgtgaggaatgacattgcatacctcactttcaaatagataagaagaccagacagaagataataatgaaataaaggacttgaaaaaccctacataccaattggacctaaaagacatatacagaatacctcatacaacaacaacaatagaatacacattttcttatttatacatgaaacactctccaggataggccatatattatgtcataaaactaaagttgacaagtgggaactaattaaactaaatttattgtcttaataaatttaaaactttagtaccataggaaatatttttttccaattataacctagccaaaaaaccctggaaatcaatagcagcatgaaaagtggaaaattcacaagtatgtggaaatgaaacaacacattcttaaataatctacatgtcagactaaattaaaagtaaaattagaaatatctggagagagctaaaaataaaagcaatgtgtcaaaattggtgggatgagaaaaaaagcagtaataggtgtgaaatttgtacctgtaaatacttaaattaaaaaagaagaaatatctcaaattcacaaccctattttacattcatgaactacaaaaaagaatctgaataagaaagctagtggaaggaaggaaataataaacattaaagcaatgatacatagagaatagaaaaaccaagaaaatcaatgaaaccaagagttggttattttcataagaaaattatgaaaacttcagtgagattgaataaaaaatgaagacagaaggctcaagaaactaaatcagaaacaagaggggacattattaccaatttttacagaaataaagatgattgtaatagaatactatatacaattgtatgccaagaatttgtataactagatgaaatagacaaattccttaaagcatacaccttaccaaatctgaattatgaagacaaaaaaatctgagtagacctctaactagtaaggagattgaatcagtaatccaaaacctcccaatgtagaaaagcccaggatcagatggcttcactggcaaacgcttcaacacatttaaggaacatttaacaccatagctgctcaacctcttcccaaaaatgcaagaagagagaacacttctttgatccttctgtcaggtcagtattaccctgatgccaaaccagaaaaagacaattcaataaaattatacaccaatatcccttatgaatactgatgcaagaattcaccagcaaaataccagcaagatccagcagcatattaaaaggattacacttagtgaccgaactgttttattcctggaaggcgaatataattatggttcaacatacaaatatcaatgtaatactccacatgagcagagtggaaggtataaatcacatcatgtcagtgaatgcagaacattcagtttcacaaaattcagcacctagcaccttttcatgattgaaataccaaataactagaaggagaataaactaccccagcaaaataaaggctatatatggaaattctcagagctgattgtcatactcaatggtgaaggactgaaagcttttcttctaatatcaggaacacaatgagttttctccacttttcccacatttagtcaatgtagtattggaagttctatgcagaacaattagatagaaaaagaaaataaagctattaaaattggaaacagaggtaaaattgtctatatgctaatgacatgttcttatatataaaaattctaaagaattcacaagaaaaaaaaactcttagagctagtaaagtcagaaagttgcaggaaaaatatctacatagaagaagcagttgtatttctatacaaaaacaattaatctgaaaaggaaaatagttccctttgcaatagcattaaataaataaattacttaggaactgtcttaaccaatgacaagaaacacttggacactgaattttgcaacatcttactaaagaaaattaaagaaggcaccccaggcatggtggcttatgcctgtaatcccagcactttgtgaggcccaggcaggcgaataacttgaggccaggagttcgagatcagcctggccaacctggtgaaacccctgtcttcactaaaaatacaaaaattggccaggtatggtggtacgtgcctgtaatcccagctacttgggaggctgaggcaggagaatcgcttgaactcaggaggcggagg[132 bp omitted]cgacttgatattgcaaggctgtcaatacctatatctatagattcaatgcaatccttaatcacagtaacatttttctcagaaatgaaaaaatccacctgagattcatgtgaaatatcaagggacactctctcccatggtcatattttagacctcgtcattttctagcaaatattcctccataataatttgcagcactactctccaacaactttgacttgtatttccaccttggtcccaccagcatgctagcatcagtaatattagaacctcgccaatacctacagtccactgagacgatcacctttttactctttcaactcctcgtgtactcacagcctgccaagcacatttcttgtcaggagaggacagctcacttctcctaatgtctcacttcccaaaattgtgtcccatgaaaatttctagctagatgaaggcagagaaagaaaatatttgatttcttaggctttatggaagcgataggaatggcaatagtggtttggaatggagactgcacgcaccagtcaacagggtgtgtcccgaataagcagtgggtaaaggacatttactgaaatgctatctccaactccacttcaggaaagcttgctgcagagttagagtgatatagtccaaatgctctgtttgagtcgcgggccctttgtctcacacgggcgagtccggggaattctgggaagtggagtccacacgctctgtggaggctcgagcacttccggtccccaactgtgacgttgctatttcatttaccacagtagtttgagtcatttccacatcttgcgagtccttccgaacgagtctcctttccttggggctcgcaaccacccaatgatcgattcaggagaaaagaagcctgggcggagagcagaggtttggaggggcgcgggcggggattgccgttccagtcagctgagccttctggcgtcggggggctctgctagggtctcagggagtgggattggcgcggcccggtgtgccctactttgacctcgcttagtccgcctccctcctccctacgtgtgcagcccctttcagtgtggtgtggagtgtcacttaatgtccgtttatcttccattgctggttcgtttgtttgtttgttttgtaacgggacttttcggaccatcctaatggattcattttgggacctgaaagaggtaacacaaatgagagccttaaaagcagtccctgtcactcggtgtctggtggtctcttgttaatttcccacgaagcctgtcaggtcctctggtggggtcagagctccagctgcaggggcgccggcccttctgcctgatccctgcaggacgctggatgatccctgacgccttctgacctctttttaggaaagtgaggggagcatttaacttttatgggggacggcaaaacggtcagggtgtttcacagctttctttttccccagcccgacctttctaaaagagctgcaggaagggacttcttggctactgatggcaaagctctacgtgagtgatccttggctttttttctttgacagagatgcttacctcaaccgagagtgtgtaggatttgtccctcgggcatgggtgtcgataatgattaagccttaattggtaactttattccaagtactttataccccaaaatacatgatcttcacagtggcactgtggagaggtgctgcttttttcattttaaagatgggcgtgagacacaggtggagcaggagttgaaacctaggcagtccaggttagagcctgagttgatcatctcttgaatgcaattctcattgaggcagaggtactagctgggaacaggtggagaacgtaagttaggacttgattgaaggcaccttgaggcaaggctcaggggcttggacttctataggagtttttgtttgtttgctttttgctttttaatttttttaaccttatctactattttctttctctctctctctctatatatatatatatttttttttttacagagtttcgctcttgttgcttaggctggagtgcagtggtgcaatcttggctcactgtaacctccgcctctcgggttcaagtgattctcctgcctcagtctcattttcgtcaaagggcccgcgactcaaacagagcatttggactatatcactctaactctgcagcaagctttcctgaagtggagttagagatagcatctcagtaaatgtcctttacccactatttattcaggacacaccctgttgactggtgtgtgcagtctccattccaaacccctattgcctaatcagtcattgtcaggacacaaacagaataagtaggaaatctataagctgacctatgtctctcaagatccaaaacaactttacacttgtcccttgtgccagtgcaatgctgctgtctcccaatagtctttggccgtaagattgaggtgacatctgcttgatgttgtaggaggcagtgaccttcaaggatgtggctgtgatcttcactgaggaggagctggggctgctggaccctgcccagaggaagctgtaccgagatgtgatgcttgagaacttcaggaacctgctctcagtgggtgaggacgggcaccccctgtaatggaatgtcaggccccaggagtggttttttaatcctagggttttcaagtttgagtgtgcagtgagaacctacatttccagtaaattttgcctggctattaggttggtgcaaaagtaattgtggtttttgtcattggaagtaatggtacactgcaattacgtttgcaccaacatgatattaccttgaacatgttgggattaagcatgtgactttgcctgttcacagggcatcaaccattccatggagatactttccacttcctaagggaagaaaagttttgggtgatggggacaacaagccaaagagaagggaatttgggtaagaaccaagcaattgtgtgtccctgcatgtgattcctgttacttctgtccatgcccatttccagcattttggggtaaatggccaaacctgtttcctggattattacagccttctccctgctgatgcccctgctcccacccttcccaccctgccatctgttcttacggtagccaaagtgatccgtaggaaacggaagtcacattgccattcctcagctcaaagcctttctggcttcttgtttttattagtgttacaacctctttaagtggcttttgtagaccctgtgatctgcccttcatcccacactgtctgactgcatctcctgtcctctcccccttgctccatcttttccaggcaccttgtcctccctgctgtttctctatcctgccaaggacattgtattgcctattgtggccggtgacataaaactcagcagactgaacaagaaacacttatctttctcttctgtaggcctgaagtctgacacatctcactgggcaaaaatcaagtggtcttagggctttgttcctttctggatgttcatggggagaagacttcattttggtttaccagtctctagtcactgtccacactccgtggctcttgtttcccttcctccatcttcaaaagcagctacattgcatccctgaccattcttccatagtcatgcttcctctgccactcttcttatgccttcctctttcacctttcaggtcccttgtgatagtattcatcactcctggatgattcaggatgaccctcccactttctgcttagctggctagtgacctcaatggcatctgtagctttaatctcccttgctgtggaacataacgtgttcataggttctgaggactggatgtagacatctttcaggaatgattattttctctactacaaaagcttctgcctccgagccctcacttgctcttctctctgattggaatacactgtccccacaaaacttactgacccctcttttagtttatgcagctctctgctcagttttaatatcatgggagaggtcgtctccaagcaccttattgaaaatactatcctatctttactcttcttggcctgcctgtgttgtgtctcatgtatttttgtctactgataagtcgcccctcccctttgcaatgtaatctcttgaaggcatttatctgtttctttatgactgcatcttcagcacctagaatactcctggtacatggcagttatctgtaaatatttggtattcttatgaatgaattaatggatgagaggacttgactgtctgtaagaatcatggagatagctaataagtaacagacatacaagagtgaatgttatatagtcatgccttggtagccgtggggtttgattccaggacccccttgtggataccaaaagccaaggatgctcaagtcccttctacatgtaaagtatttgtgtatatcctacacacaccctttcatatactttaagtcatgtctatattaggtataacaccaaacgcaatgcctacccatcgctttattcacatggattcaatgtataggactcaatgtgagaaattcaagttttgctttgtggaactctgtggaattttttttttccaaatacttctgatgcactgttggttgaatccatgtatgctgaacccacagatatagaggctgactatatgttgcaggacagttgttggtttgttttgttttgtttttttttttttttttttttttgtctgtgcagggctgcttatccaattttgactttcttaggttctcttgacatggttggttttctgtgtgtgcagttgacccacatcccatggaaactttcaagcatggttttcatgaccacattgagaaacatgccttccctggggcttacccttgagctttccttaaggaccgtgtttatgtctgtgagaaattctttatatctatgagctgaatgttgcttatatttccaaatgtttttcttcaaaaaatgtgtctatttctgcatctttatacaaatttaattgtcaaaaatgtgaaggaatatagattttactgaaatctttctttatatttatagagatatagtgttgtattttcatctggtgaactttatgacctgaaaggaattgggaaactgctctcaaaatagaaacctcccgaaggatactctcccttctctttaaagacttatttatacgtgacagcatattaaatatatccatgtactactgtgtactgaaaggtacatacttatcaattaatattttccaagattctttccattggaaaaacttggaagttatctttccattggaaaaatgtacctaattcaggacttggtaatatcctgacaaagttctaaacattttgtgagcattagccatagtaagaaacatatctgtcagtgtaacacggacaaacatttttcatgtgtgtagatgtgtgtgagtggctttagtaagcaattcatgtaatgacatttttcctgcttgtcataatgctgcaataattttcattctagttcttgttttgtaaatgtttattgcaggttttaactttatttcagctcattgaggcatagtcttgagtataaaaagttataaagcctgtttacctcatagactttcttttcattccacgtgtttctgaacaactttgattgtctgatcaggagcatccccctttgtgaacccctggaaggacagcctttcagattcccctcagaactacagttgtctgtccctgtactctttcagataaccaagttacttactatccatatcaaaacagaaaaataagattaagtatttttatacatgtgtaaaattattgtgggggaatactttgaaggtatagatattaaacactctgaggtgtttggtgttaacattgtgaagagttcaaccaactacgaagtttagtgggacgttttacagaggactgctctcacttcacatcaagtgaaaattcggcagcttttcaaaactatcttcatgtttagtaatttgctagaaagactcttagaattcactgaatgcttttatcctcacagttactgattcttacagggaaaacatgcatattatagttaaccaagagagaaactaaataagacagagtccagggaagtaccaaatccttattttctattgtattctcccagtggagtggggtatgttacattgtcaggattagcatgtgacttagacacagataactcccaatcaggggaacttacctgagtgctggggtccagagtaattactggggctccaatttcatagccatgattggttggttgattcccatgtggttgtttagtctcctggttcactgattccctgtgaggtaaagcccttccatgaatcacactgatgttctttctgatgtgaggagtatcaccccccatgccccaaaggagtggccagtcacaaccctaaataatattgtttcactatccagagttacccaggttttaccctcaagcaaagagactctcctcaggcatgacacttcaagatcctagagattacctctcagatgctgacgacaacgtcctgacctctttcaagttaggttaacttctttgtaaggatgtataacagacaaatatacaaactgtttattcgttattgcttctccttaaagttcctttggattcatatttcactacatatgtagtattttagctttataacttaccacacaaaattttagactgactaaaaaattcactagaaatagcaacaagtgaaatgtatatattaattttttaaataagtattttatttctatccagaattttacatatgagacatggtgtggttctaaattggtctcatgcaaaccaaaaaccagggtgcacttggaaaacagaaaaatgaacgttcattaaagttaaatcccacatcctaagtgtgaagtcttgaaaacactgaacaaagacttcacttgtccacatgtcttatttggtgtttttgttcgtttgtttgtttctgtttttgttttgttttgttttgttttgagacggagtctcactctgttgcccaggctggagtgcaatggcctgatcttggctcactacaacctctgcctcctggatttaagcgattctcctgcctcagcctcctgagtagttgggattacaggtgtgtgccaccacacccggctaatttttgtgtttttagtagaga[139 bp omitted]cttataggaggcaagatccaaactgagatggagactgttccagaagcaggaacacatgaagaattttcctgcaagcaaatttgggaacaaattgcaagtgacttaaccaggtctcaagataccaccataagtaactctcagttatttgaacaagatgacaacccctcccagattaaagcaagactatctacagttcacacaagagaaaaacctttccagggtgaaaattgtaaacagttcttcagtgatgtttccttctttgatcttcctcagcagttatattcaggagagaagtctcatacctgtgatgagtgtggaaaaagcttctgttacatctcagcccttcatattcatcagagggtccacatgggagtgaaatgctataagtgtgatgtgtgtggtaaggaatttagtcagagctcacgtctgcaaactcatcaaagagtccacactggagagaaaccattcaaatgtgagcagtgtgggaaaggcttcagatgtagatcagcacttaaagttcattgcaaattacacatgagagagaaaccttataattgtgagaaatgtgggaaggctttcatgcacaatttccagcttcagaaacatcacagaattcatactggggagaagccattcaaatgtgaaatatgtggtaagagcttctgtcttaggtcaagtcttaataggcattgcatggtccacacagcagagaaactgtacaaatctgaaaagtatggaagaggtttcattgataggctagatttgcataagcatcagatgattcatatgggacagaaaccatataattgtaaagaatgtgggaagagcttcaaatggtcctcatatcttttggtccatcaacgagtccacactggagaaaagccatacaaatgtgaggagtgtgggaagggctacattagtaagtcaggtcttgacttccaccatagaacccacacgggagagagatcttataactgtgataactgcgggaagagctttagacatgcttctagtattttgaatcataagaaactccactgccaaagaaagccattgaaatgtgaagactgtggaaagaggcttgtatgccggtcatactgtaaagaccaacaaagagaccacagtggagaaaacccatccaaatgtgaggactgtgggaagcgctacaagaggcgcttgaatctggatataattttatcattatttttaaatgacatataagttatacatatttatggagtgtgaaatttgatacatgtatataatgtgtgctgattaaatcagtttaatttcacctgaaacattatttgtgttggaaaaaattgaaaatctgttttttggatttgaaaacaagttactgttggttatagtcacctttagtgctatagaacaatagaagtgaagtagtgaggagtttgtttgtttgtttgtttgtttgttttgagacggagtgtcactctgtcgcccaggctggagtgcagtggcgtgatcttggctcactgcaccctccatctcctgggttcaggccattctcctgcctcagcctcctgagtagctgggactacaggcacccgccacca[131 bp omitted]aataaagttacaggatcaagggccagggtgccagagagaggaaaagagagggagagagagatttttcttgggactggaacctgaacaaacttagtccaggggaggggtgcagtccatcccactgcttgccaggttgatcaggcctgcaaagtcaaccttttcaatttgactttgaatagaaatcctgcatggatttctattcaggtgactcggatcagtaagacagggaaactttccactcattcctcttggatgtctattcaggcaacacaagccagtaaggattaggaaaggagaggcaaagcaccctgagtaagaaaaaagataggaagaggaaaagagagaaagaaaaaagggaagggattgactgggcatggtggcttatgcctgtagtcccagcactttgagaggccaaggtgggcagattgcttgagtctaggagttcaagaccagtgtgggcaacatgaggaaaccctgtctctaaaaaaacacaaaaattagccgggcatggtggcacatgcctgtagtatcagctacttaggaggttgaggaaggaggatcatttgagcctgggaggcagaggttgcagtgagctaagatcacatcactgcactctagcctgggtgacagagtgagaccctgtctcaaaagaaaaaaaaaaaagaaaatcattggccggtagggtgacgtggccccaatccctgttggactgaacaaaggaggatgaacgcgggaataaagataaagacaaaagagtatattcggaagaaggggtcaggaggctccttgcttctagtgaacaagggccctgagcttctagctccctttgtatttattgagcaaaggagatagagagaaggaggtggttgtcagtcagctgcttgactcagtgcaggcctggatgactgcattccctgaacagtagtctccagatattctagtagataacctcaaggagcacggcaccagggagtgattgaactcagcataccttctggtggcaggtacagatatgagtttgcccacatcctgcattcatgataaacagtgtgttgtttgatcatatagcctcactggactgctgagttggtcacgatcctccggctttcggctctctacagtagaggcagaggcaaggtccatgaggctggagaaagccaaccattgtggtaacactgaatcaaaagttcagtcaggtgattttcaatcatgaagaaatcttgtccagcagtcctgtcagctcacatgtctacccctcagggagagaaaggccccccatgtcccatgatcctagacaaatccccaaagaatatgccaccaaccacaggttcctgggctctgcaatagaaattgaaatgagactgaaagggttttcccagacaagccttcactggagcttatgcctggacataaggaaggcggcacaagagagaatttcctgactcccttcaaagagctcataggattgtttatttggcaaagcgtgggaattaacatcagggatagggtttgaaggctgggctgggaaaagcacatgactggtagggcatgcaggtcagcattacctggttgcaatgcttatcttgtgtactgggccacctggtggtctgggtggtggcaacaaggctgtaaatcaattgtttagcatttcatcctgaagggagacactctacaactttggttatcacccaaggccagttcctggaattcttagcagtgaggtagaggtgtgggttttgtgatcattgggaatgcatgaaagaacgctctagtcggggtgaactgaagccaagccctgtctctactctgtcaatagaactcagaagagttctactgcaagtgaagaaaagggtgactggaatcacctaacagagtcacagccccaaaatcaaatccaagacatgtccagtttacaaatccacattcatttacatgaaagggaggccaatactggatgagaatagatcctaccacatttcagagttctccacaggaaactatggccatgaacctgtgtgactatgtactcaaaaggagaaataatcactctttttgacaatgactgaatccttattgtcaaatggcacattaatgtgatgattggacctggtgagaaaaaagtagaaagtaatctagacatgtttgtaagacacatgcatatcagaaggacagaataagtcctataaatattcataggacttccacctcagtgaaatttccatgagttcactgatgcaaaactattgagatattccttctaggacaagcgtggtggtcatgcctgtaatcccagcactttgggaggccaaggcgggagatcacttgaggtaaggagtttaagaccagcctggccaacatgatgaaaccccatctttactaaaaatacaaaaattaactgggcatggtggtgggtgccagtaatcccagctctttgggaacctgagaaaggagaatcacttgaacccaagaggcggagattgcagtgagccaagattgcaccactgcactccggtctcggtgacagagtgagactgtctcaaaaaaataaataaagatattctttctaatctaaggtgtagggcaagtagcatgtgatgcttcctaaaaccaaaaaaagtgtcccaatgcccagtggccctgctcagctgttggaggctacttattcttcactgtggtgtactactctgctttttatgagtgacctgaaatcattttgcctcagttgagacaaggttgtgcaatatgtgccagctgtcatataagcttctcttccactagggtcctatgatccaggagacccacaagtgactgaaatatcagaaacagatagtgatgtttggagagagtggctggccacaactgatgaatcaaagcacaaacacatagaattttgtagcgaagccctgaaatcctctacgtatgtttactctctctctctcttttttttttttttgtacagatggggtctcactttgttgcccaggctggtcttgaactcctggcatcaagcagtcctcccacttagtaaagacagagcacttaaccatgggctaccaaattagcatgtgagccaaggtttccattatgaattgggtgtagttggccactccatatctttaaattgtatgtgcacattggtattccacttggaagtggtatatatgagattgggttggagcgggtcctgaagccacaggtaagtgcccctaaggcccattgttcctactcctgctacagtaccatcagaatgagtgaacatgaagataagtcataggaaattattgtgtctcagaagcaaaaaaaaaaaaaaaaagaaaaagaaatgagtaaaaatacacaaaacccaaggcaccatatatgcattataggtgtcctaggaggagacagaaaaagtcaaagagagctttacagaaataaaggctgaaaacttctcaaatatgaagaacacattattctgtaaatccaagctcaatgaatttcacataagataaaatcaaagagacccaattgagacatattgttaaaaattattggaggacaaagacaaatgaaaattttgacagcagcaagtccaaaatgacttgtcatgtacaaagaatcttcaataagatgtcagcagattttcagcaaacatctgaagacagatgatgtattctctgctgaaaaaaccaaaaacacacagttgtctactgagaaatcaatattcagcaaaactatccttcaaacatgagagataaattaatacttttctaaagaaacaaaagccaagagagtccattaccggaagacaatttatatgagaagttataaagggatgccatcaagttgaagtgaaaggatgctagacagcaacttgaaaccatatgaaaacataaatatctaaagtaaataaaattacatgaatgatgtaaaactcactatttttgtaatttgagtttttactccactttttattttgtacactatgtaataggaaaatgcattaaaatgattgtaaatctatgtgaatgggtacacaatatgtatagttgcaatacatgataccagtcacataacatgaagggaagcagaagttgtgaaggagtagcgtttttgcatgtgactgaagttaagttggtatcaattttaaatagatggttataactttagaccatagcatgtagaatgttatgtttcttcaaataaagaacatatcagtgagacacacaaagggaaatgagaagagtttcaaaatgtatcactacagaaaaaggactcaacataaaggaaggcagtaatggaggaaattaggggcaaaaggcagtaagacatttaaaaaataacaaaatggtaagacctttcctacaaataatgagtttagtgtaaatgagtgaaactcctcaaccaaaagatgttcactggcaaaaccattgaaaaaaacagtatccaagtgtatgctctgcacaagggatatgcttaaatctaatgatgtgcatagattgaaacggaaaggatggaaaaagttattccatataaatagtaataaaaagagagcaacggtggctttactaagggctaaattagactttaagtgaaaaattgttagaagagaccaagaagaacattatatattactaaaaggatgatttcaccaagaagatataacaattataaacatatgtgcaccaaacatcagagctcctaattatatgaagcaaatacagaattgaagagagaagtagctacccaataatacagttgactgtgagccacatggatttgaactgcataggtacacttacgtgtgaacttttttcaaccaaactcagattgaaaatacaatattcatgggatgtgaaacccacatatatgaagggccaaatttttatatacattggttctacagggctgaccgcaagacttgagtatgtatgcattttgatatacccacatatactaagggtcaactgtactaggacacttcatacctcacttgcaaatagccagaccaaagatatgtaagaaaaacaaacaaacaaagataagtaaggaaatagaggatttgaagaatattatacacaaaattgacctaaaacacatatacggaataacccacacaacaacaacagaatatacattttctcatttgcacatggaatattctccaggatagctatatattaggccacgaatcaagtgttaataaattttaaattttaatataataaaatacattttttccaattacaatctagatcacaaaaactagaaatgatagcagcaagaaaagtgaaaattcacaagtatgtggagactaaacacattcttaaataacctatatgtcagagtaaattagaagtgaacttaaaaaatatatggagaccattgaaattaaaaacaacgtgccaaaatttattggatgaggtaaaagcagtagtaggtgggaaatttgtacctgtaaatgcttatattaaagaaagaaatatcttaaattcacaacctaattttatattcatgaactacaaaaaggcaaagaatttgaaccagaaagctagtagaaggaaagaaagaataccgattaatgcaatgacaaatggagaatagaaaaacagaaaattaaccaaaccaagagttggttattccagaagattaagaaacttgagaaacctatagttagattgactaaaaaatagagaagcctcaagaagcaaaatttacacacaaaaatatgaactttactgcaaattttagagaaataaaaatgattataacagagcactatctttaattgtatgccaacaaattgtacaacctagataaaatagacaaatctcttaaaacatataccctaccaaaaatgaatcatgaagacagaaaatctgagtagatccttaactagtaaggagattgaatcagtaacccagtgcctcccaacaaagaaagcccaaaattaggtggctccactggttaattcttgcatttaaaaaaaaaattatttttatttttagtaacccttattttacttagtaagaattattccaaacatttaaggaacacttaacaccataactcctcaacctcttcccaaataggcaagaggagggaacacttcctagttccttctctgaggccaggattaccatggtaccaaaccagacaaagacattgcatgaaaattatacatcaacatcccatatgaatactgatgcaagactctaccataaaataccagcaaaattcagcagcatattaaaaggattatactcaatgaccaaacatttattcctggaatgcaaatataatttatgactcaacatacaaatattaatgtattatgctgcatgaacagattgaaagatataaaaatataatccacatgatcatgtcagtgaatgcagaaaattcatttaacaaaattcacactttcatgattaaaataccactcaactaaaaagaaaagaaactatctcaacaaaataaaggctagatgtggaaaatttcaagagcttattttcttattcaatagtgaaggactgcaagctctttttctaatatcaggaacacaatgaatttgctccacttttccacctctagtcaacatagtattggaagttctaggcagaacaattaggtagaaaaaggaaataaacctgttaaaattggaaacacataaaactgtgtctacatgctgatgacatgttcttataagttctacagaatacacaagaaaaaaacctcttagagctaacaaagtcaaaaagttgctggaaaaatacctgtatagaagaagtagtttgtatttctgcacaaaaaaacaatctgaaaggaaaatacttatcttgacaatagcatcaaaaagaaacaattacttaggaactgtcataaccaaggacaagagaagcacttgaacactgagctctgaaacatattactgaaggaaattaaaagaggcacaaataaatggagatatatccattattaatgagttgagagataaattacaaggcagtaaataccacctaaaatggtctacagattcactgcaatccttaacgtaatcacaatgattttttttcagaaatggaaaaatccacccaagattcatgtgaaatatcaagggatgctctcttccatggtcataacctaaacattgtcatttcctagaaaatactcttcggtaataatttgcagcactagtccgcaacaactttcatctgtattgccacctgagtcccatcagcatacttgcatcgataatcttagtacctcgccaatacctacaatccactgaggctatcacctttttgctctcttaatcccttatgtcctcacagcatctcttgtcaggagaggactgctcacttccttttctatcttacttcccagaatatgtcccatgaaaatctctagctagacaaaggcagagaaagagaatatttgattttttaggctttatggaagagaaaggaatggcaataggggtttggagtagaccctgcaagcactagtcagtagggcgtatcctgaataaatagtgggtaaaggacatttgtggtgatgctctgtccaattccacttcaggaaagcctgccacagagttagtcagagtgatgttttattagaataatgctgacctccatgtttttgatttttgaattattctcacactttggaattaaggaatttctcattacaaattatgctttagatactttgtgtataattatgctcttggtttctaagcattgctgtcaggttatacagggcagtgagtagacatatctgtgaagcattaactctgggcattgtggtgagtgtaatggtagaagtattttcaatgtgttgtgagggaagggaatataccaattcatgataggtgagtgggctattggtataagtgaaagaaggtccagctgcttatctcttatagaaaaaagccaaaataacaacaggaaagtgtgataaaaagagtgaattttattacttgttgctagcaagggaaagagtgattggaatcttttccaaaagttgccacttttcaatttctggagagagggccacagtttaagaagtgggcttggaatgcagagaggtaagggggtttaggaggtacctgatggcatgtctcgctctgatgatcttgaattattgttgcatctggtgaaggggccagcacgatcatgggctcaatcaggttataaattaatggactgtcaatcttgcagttcatctgtagccaggaggagagaattccagagctgcctgatcctcatcagtattcttcccctgaagcttctaaggaaatatgtgagcagataagtgagcgcggtgtgagcttaacaagcatcctggtaaataaatgtgtatagggcatggaagcataaggtgggaaaaagaagggagtggagttttaaagcagatttggaggctgtatttcaacacgaaagaaaacacatctgtagtttgtctcaaagctacgtcttgagactggggagaagtgggaaagaaaagacggtctttaaaatgtagtttgaagctaaggtgcttggttacacaggccccaaaatactattaggccaaccagtccaaccttgcttaaacttgagtaatgattcaaatatcataaaatgcatcactttaaaatatatcctttagtggttttttagtaaattcccaaagttgtgcaactgtcactactctctaatttcaggttttttaaatcggcccagaaagaaatcccctatccattggcagtcactcccaatcctcatcctttctccactagctcctggcaaccattattctactttctgtttctacagatttgcccattctgaatatttcatgtaaatgaaatcatacaacatgagctctcttctgaatcacatctcttagctttcatttctcttggtgtatacttaggagtgaaattgggtaataagctgtattagtctgttttcccactgctataaagtactacccgagactgggtaatttataaagaaaagagatttaattgactcacagttccaaggattgacaggaagtatgactgggaggcctcaggaaacttacaatcatggtggaaggtgaaggagaagaaacattagaacagaaaagagagagcaaaggggaaatgccacacacttccaaacaaccagatttcatgagaactcactcactatcatgagaatagcaaggggaggtggaggttgctatgagctgagatggcgccattgcactccagcctgagcggcagagcgagactctgtcttaaaaaaaaaaaaaaaaaaaaaaaaaagacattccttagaaaagcagggattgataataatcagttgtgttatctttttgtagtgaaataatttgaaattcacaggaaattgcaagggaagtacagagaaaccccgagtcttccatctacattcttaattacattttacattttacataattttagtaaaatatcaaaaccaggaattcaacattggtacaatgtgtgtgtataccacttttatttgtcgtatttcatgtagatttaatggaatcaccaaggcagtgatgatacagaaagaactattccatcaccacaaagatctctcttgaagtatccctttatagtcaacccaacttgtgtccctaccattcattacccctagcaactactcatctgatgtccatctctacattttgtcattttgggaatgacatatagatggaatcatgtattatgtactttttcagattgtctttttactcagcataacaccctttagctcaacttgtccagccagtggcacacatgcagcccaggacggctttgaatgtggcccaccacaaatttgtaagctttttaaaaacatcatgagatttttttttttttgctattttctttttagctcatcacctatcattaatcttagtgtattttatttaatgctgtgagtatctgtttctgtgttcaaataccatccataactcttcttaagtgaattgggtctttgtgttttttgctccttttcttcttagactattttatggttgagttgtgagagttgtttatatattgtagatataaatttttcgtcagatatgagatctgcaaacactgacaaagctctaggtactgacagttttcctacactgtcttcttaaaattttatgattttacattgatatttcacatttaaatctatgatccaatttgacttaattttgaaataaagtctcagattctttttcttttatgcacatggatgttcagttttcccagcagtctttgatgaaaacactgtcccatttctatttatttgctttagcattttggcacaaatcattttgttatagttggttagggtcatttctgggttatctattgtgttccactgatccgtgtgtctatactcagagaatattactctgccttggttaatgtagatatataataactcttgacattattagagtgattcctcccactttattcttcttttgcaaagttgttttaggtgatctagttcctttgccttttgatatgaattttttatctattaaaaaaacttgctggccagggtgtggtggctcacacctgtagtcccagcactttgggaggccaaggcaggcagatcacctgatgtcgggagttcgagactagcttgaccaacatggcgaaaccccgcctctactaaaaatacaaaattagccgggcgtggtggcgcgtgcctgtaatcccagctactcgggaggctgaggcaggagaatcgcttgaacctgggaggtggaggctgcagtgagccgagatggcgccattgcactccagcctgggcaacaagagtgaaactccatttcaaaaaaacaaaataaaacaaaacaaaacaaaaaacaaaaaaacaacttgctgtgattttgatagtaattatcaaaaagctgtgcatccattgggagagaattgacatttttactatgttcagtttcacaatctattaatatagaatatctctccatctatttcatgttgtttaatttttttcatagtgctgtaattttcaacttgcaacctgtgtaattcttttgtcagatttatacctgaatatttaatttattttggtttccatgtgtttattgctattataaagaaatacaatggattttggtatgttggtcatgtatcctatgatcatcctgaattcacctactatctaggagctgaggggataggaagacttcacattgtaaagatgacactactacccagagaattatacacttttcatagaatctttatcaaaatcccaacagccttttgtgtagaaatagaaaagccaataccgaaattcatatgtaattgcaatggccacaaatggaaaaatcaatcttgataaaaatgaacaaagtggataacttgcactttctgatttcaaaacttttaccaagctatagtaatcaaaacaattgttttatctatttaaaaagattctagcatacaaagttgttctagcatacaaagatatatatatatatatatatggagagagagagagactaatgggctaaaattgagagtccataacaaaacccataaatctaaggccactttattttcaggaaacattcaagattactttatggagatagaatagcagccgatactgctgggacgctgatacatggacatacaggataatgaagttaggttcgtacctcacactatacttaaaaattaactcagaatccgtaagtgacctaaatttaagagcttaaactataaaactcttagaaataagcatagagataaatcttcctgactttttatttggaatggattcttcaaagagacaacgtgagcagaagctaataaaaaatacataaattggacttcagtttttaaaaattctgtgcatggatatacatggtcaagaacacaaaaagaccatgcagcatgggttctagtatcccgaatataaaaagaattcttataacgcaatgaaaaaagttgaa[136 bp omitted]ctgtctctactaaaaatacaaaatttactggatgtggtggcgcatgcctgtagtcccagctactcaggaggctgaggcaggagaatcacttgaacccaggaggcagaggttgcagtgagccaagattgcgccactgcactccagcctggcgacagagcaagactccatctcaaaaaaaaaaaaaaaaaatgggcaaaggacatacatgggcatttccagtatacaagtgaccaataaagggctcgacaccattagtcatgaggaaaatgcaaatcaaaccaacaataatataccactgacaaccactgtgctagctatcattcccaaaaatagaaaataatacatgttggagagactgtggagaaattacaaccttcacacattgaaggtgggaacataaaatggggcaatttttctggaaaactgttttgtgatcctcaacatagaattaccctattaatcatatctataattcatataatttcatatctaggtatttacccaaaggaactgaaagcaggtaatggaataaatatgcgtataggaatgtttgtagtagcactattcacagcagccaaaaggtggaaagaaccaaatgttaccagtagatcaatggataagcaaaatgtagtataagcacagaataaaatattattcctgtataaaaggaaattatgtactgatacatgctgtgatgcagatgaactttaaaaacattatgctaaatgaaaagggtcagaaacaaagatcccatactgtgtgattccatttatatacaatgactaaaacagataattaaataggatagaaagatttgtgtttgccagggataggggtatggccaatgtgagtgactgtttagtggggatggagttttctttgggtgatgaaatggtttagaacttaagaggtcgtggttttgtatttgtacgaggtacccttgccattaaattatatatttttaaatggttaattttattttttgtaaattacacttaaagaaaacttatttaaaataataaagactatgttcaaaatatctggcatagccaaaaaacctagaagcacagtcagagaaaactcaaactatttttttaagaaaacatttggaagatatgttaatattgtaaatgtataaataatacttaaaattaaggagaaaagaccaaaaacacaatagaagatgggacaagagatttgtacagtttccaaaaaatataataatggtccttgaaaatatgcaaagatgaggtgcagcaaaccaccatggcacatatacctatgtaacaaacctgcatgttcagcacatgtatcccacaacttaaagtaaaataaagaataattattattattataataaatgtcataacattttagagggggaaagaaaattagagattatcttatacaacttggttattttacaaatgacaaagctgtgtttctaattctttaacttgtgaataaatgtgatgaataaatgtggaaaaaaaggaatataggcctgactgtgacatttacagggttcagggcaagaatacaaatggaggcctacctaccatatgccttgatatttaagtgtacaaagcaagctaataacatgtaaaataaaatatgttctacccttataaaaaaagaaaatatgcaaagatattccatgatatttacaaaaaaaaatacaaattaaaactacatttagttaccatttcttaccattagattgggaaaactttaaaaacatcaaaataccacattctgttagctagtgtcaaggcaagacattcctcatacattgcttctggaaatgaaaaatagtataaaatataaaggcaatttgacaatatgcaacaaaatacacttctattcccattttggccctgaaatcctactttttgaaatgtacccttaacatatatcatcaacagggagaaaatatatatgtatgagtttatgtatcatggcattgtttgtagtaataaaatattggaaaccactgaaatgcccatgaatgggtgcagtattgaataaagcacacaatggagtttgtggagttgtgaaaagcatgtactctatatgaagtgattttccaggatatattgttgagtgaccatagaaggtttagatgaatgctaccttttgtttaagtaaacagcgaaaataagaaatctacatgttttctgtaaaaactggtaatgataaaccagaaaataatgaaattggttacacatgggtattaggagtcaacactgtggaagtggtgcggtggaaaggaggggagtgagtggcacttttctgagaataacattttgtatagtatagacttatgggaatatgttattgattgacataataatataaaatcaagaatggagataaaccaggaaacttaaaatcaaagaataacagactaacctaaatgcattcaaatcaataacacagactaaagatgaaagcaagaagtcatttaagtaccatattaaacacagtacagtattttgagtatatgtcctcagcataaagacaaaaagaactgtaatgatgttgaactctagttagctgagttatttttacaataatatgacttagtaattatgaaactacctgatgcaatggtttaaatgtttgtggaccactaaaattcacatgtttaattccttacccccaataagatggttttaggaggtagagcctttggagggtgattagattatgagggcagaactcttattaatgggatgagtccctttgtaaaagagacctgaggaaacttgttcatcacttccaccatttgaggacattgcaacaaggtgccacctatgaaccagaaagcagccccacttcagacataaaatctcccagtgccttgattgtgaggaataagtttctgttgcttataagccagctagcccatggttttttgtgactaagaatattggtattgagaagtgggattgctgttgtaacaaatatctaaaaatgtggaagtatctttgtgactgtataatgggtagaggctgggagacttctgaaatgcatgctaggaaaaacctacattgtcatgattggactgttaaagacaattctggttagggctcagaaggacagaatgagagctagagaaagcatcagtcttcttagagtaaacctatgtggtcacgatcagaatgttgatagaaatatggacagtaaaggccattatgatgagacctcagtcagaaatgtggaacatgttactggaaactgaagaaagcggggttcttgttataaaggggtaaataatttggctgaattatattcaggtcctagtgttttttggtaggtagaacttgtgagcaatgtaattgaatatttagctgacactatttcttaacaatgtgttgaagttgcatcttgaataatcttgactacctatagtaaaatgtagaaagtgagaagtgactgaaagccggaattactaattaaaaggtaaagagaactaaatacttttaaaatttgcagcttatctactttggaaaacatgcaaaaccctgtcctggagaaaacaagggtgtggctgaacaactgatttatgagattagtatggattgaccatgttgactcaaaccaggacctattgtccaagacaatggaagaatgaccccagaagtatttcacagatcttggaggctgctcctcccatcagaggcccagagcacagggacgtgggcaacagcagggacctttgatgccaggtgccgcctaacatctcaggctcagctccttgcatacactaccactgagagtatcaataaattttatcttttgtgaatgcagagtagagtaaggatacagctgtaattggtataggaatagccatcactcaattttcaagggggcattgaaaatttgtttggcactatgtggttgctcagtcaccttaatttttgtccaaaccaaactgtgaaacgtcagccaggtgcagtggctcacacctgtaatcccagcactttgggaggccaaggtgggcagatcacgaggtcaggagattgagaccatcctggctaacacagtgaaacccccatctctactaaaaatacaaaaaattagccaggcgtagtggcacatgcctgtagtcccagctacttgggaggctgaggcaggagaatcacttgaacccaggaagcagaggttgcagtgagccgagatcgcgcactgcactctggcctgggcaaaacagcaagactctgtatcaaaaaaaaattgtgaacagtctttttttaatttttttttatttttttttactttaggaaaatggatacaggacattagactctttttaaaaagaaaaatataggtcgacaggtcaatgtatgtttatttgggaggacaaaaaatatggtttatcttcaaaagagaattttagatgaattgtttcctgatttagctttatactattattaatgtctttcaactaacatatgccagttttcaaattgtttcctataatgaagatattttaaccaagaaatggaaaggaagaaactcttaataataaatcatgctccgtcacctatagaatcttctccagttttatggcattgaatcagacattgggtgtcagattgataccaatgccaagctcttcaacagttatacttgctttaagatacttagcaattcactaacttctctgaaatttagcgtttctacatctaaagtagaaatattactaccatgagaatgttaaatgtagcttttccatgaggacacagcttctccattggtggctggaattttgtttttcctgtcaaaccagtggtaccacagcatctggactagggctgtaactgagaaccaccatttttctaagagacagcttatttatttctctctcttttctcattcccttagttccccacttcctatgtagccctttaaaaatgcaaatatagacttttacctccccttcaccagacacttcctacagggaaagttcatctaactgtgtgctccaagccagaactctcctccagaattaacagtcaatttacaaactaaagcatgctggcctctgaactctcactcaccaggaggttgcctgaagagacaacagttgaaagcgtgcctgctactctctcccttctggttacaacttatttctgcccatgaaaaagccagctcaactgcctaatagataaggcaccaagccagcacacagaccccttccctcttcctcccctaccttttaaaagtgcctgctttctgctctaaaagccaagccgtgcacttaaagacaacacctgtgctacttcccctacgctagctctagaataaatcactttctttataccagatctccctcttgttaactggacgttgcaaacgggaagccactgatctacttttcagttacaggggctgatgctttcctggcttctcattgcccctcccaacccattctacctggctcattctttaaaccagtggtccccaaccgttttagcaccatggaccggttttgtggaagacaatttttccacggactggggaatggtttcgggatgaaactgttccacctcagccattagattctcataaggagcgcctgacctagatccttcgcacgcacagttcacaataggatccgcgctcctatgagaatgtaatgctgggctgatctcacaggaggtggagctcaggccataatgctccctcacctgccgctcacttcctgctgtgccgcccggttcctaacagtcagtggaccggtacaggtctgtggccctggagttggatatccttgctttaaaccctgagcctcctttcagccatctgacggctcaacagtcactctatctagctccttgaatattgtatctcctcgcttgttccctgtccaagaacactcctgtcaatcatgggagacatttagacttcataaattctttctattcaatattttcgctcgaggactctgggaaggacaactgtcagggtaacagtctgcattccccaccaggaacctggggctatgaaattcgttccccgtgggtgttgcgggaagtgtaatcgaggagcaccatgtagtcgcaacacttgagcctaaagggtgaggtgatggacattttccttttgcatctgaggctctgcagtccagacaccttgcgggattcctgatacttcagctcaggtaggcgtttccggagaattctgggaagagtagtccattttacgggaagtgtagtccactggctcgtggaacactgggtattttggctctggcaggtgaaccgttgaattctgggaacgatagtccagacactctgcggagtcccgggccctttggctcaggggggcgggtccggggaattctggggagtggagtccagacactctggcgcagagaggacacttccggtctcctagtctgaggttcctgctttaatgaccggggtagtttgagccatttctgcgtcttgcaggacattttgaacgaaccccctttgcttgaggctcgcaaccacccgatgatcgatgatcgtctcaggggaaaagaagccttggcgaagagcagaggtttagaggtgcgagggcggggagggtgtttattgttcccgtcagcggagccttctggcgtcggggggctttgctcgcctcccggggggtgggattggggtggccttgtgtgccctgctctgagggtttccaggactttgacctcgctcagtccgcctccctacgtatgcagtgtgtacactctttctcgcagtgtgatgtggaatgttaatgtctctgtacttcccattgctgttctttaaaatggtgcttatagggtcatcctaatagaattgttttgcgaattgaaagagataatacaaatgaaagccttaaagttgtccctgtcacttggtgagtggtctcttgttgcctgatattttaaaacgtttgatatcatttcaaagctatagaaaaattgcaaaaacagtataagaaattctcatataccctttacccaaatttgccaagtgtttacatttttcctgtttgctttgttgatgaccatcaaccaaataccaccaggaacatacctgtaaccagagacagctgattggtagctttctgcagcaaggaagcccacataccacggtaattgtggggtgtcttggtaagaggcatttaggaagggctggttatagggtttcacataacatggtagataatattggatattatgttaaataatactgttaccgattacatgtcagatagatgtgttaaaagaatactagtatttgtagtgtacttactagatagtgttggatagcatattacctagcatcatgttatctaatctgcagttccatatacgaatttgttaaatttttcatttaaagtccttatgactgtcctctgccccacccttcacctattcaaagtccagtttatgcgttgtctttagctgtcacatttccatagttgttcatttggagtttgatattgaagggggcctgcctctccacacctgtgggtgtttctcacaaggtggaaatgagaaactgagaaaagaaataagacacagacacaaagtatagaggaagaaaagtgggcccaggggaccggcgctcagcaaatgaggacctgtaccggcactggtctctgagttccctcagtatttattgatcactatctctactatcttggtgagggggatgtggaaggactatagggtaatggtggggagagggtcagccggaaaacatgtgagcaaaggactctgtcataaataagtttaaggaaaggagttgtgcctggatgtgcacataggccagatttatgtgtgactttacacaaacatctcagtgcagtaaagaccagtattgccgccagtatgtctcacctccagccataaggcggttttctcctatctcagtaaatagaatgtacgattgggttttataccgagacattccattcccagggatgagcaggagacagatgccttcctcttacctcaactgcaaagaggccttcctctttcactaatcctcctcagcacagaccccttatgggtgtcgggctgggggacggtcaggtctttcccttcccacgaggccatctctcaggctgtctcagtgggtggaaaccttggacaatgcccaggctttcttgggcagaggtccctgtggccttccgcagtgtatggtgtccctggttaatcgagactggagaatggcaatgacttttaccaagcatactgcctgcaaacacatttttaccaaagcacatcctgcacagccctaaatccattaaaccttgagtcaatacaacacatgtttctgcgagcacagggttggggctagggttacagattaacagcatctcaaggcagaagaatttttcttagtacagatcaaaatggagtttctcatgtcttcctttttctacgtagacacagtaacagcctgatctctttttctttcccctacagatatatttcacatttaggtttagattatacattgttggtggggattccacaggagtgttaagatgcccttttctttttttttttttttgtttgagacagttttgctcttgtcacccaggctggggtacaatggtgcaataggatgcccttttcattgtaacataacaaggtccaagtgatgttcgtttgtcccttcattggtgatctcagctttgtcactggccaagaagatgtctttcagatttttccactcttatgttacttttttttaaattatgaagtttcttatgggaaaatacattattagtgggcattttcttgtaaaaaagagcttccatttctcctctattggttcattgatttgttcaactataaatattctatcaatgtggactcagaatccagtcttattgattctaatgatatgtgcattaacagttttttttttaaactctaggtttattttagttatagcattcacccatttcaggtatacaagtcagttcagtggtctttaggaactttgaagtggggtaatcatcatcataattcagccgagatcactttcatcccccagttggactcctcatgcccatttactttgaacctcattctcaactcaaatttagaacaactgctaacctactttctattctattctacttgtctattccagacatttcatataaatggaatcgtagggtctgtgggtttttgtgacttgcttctttcatttactgtaatgttttcaaggttcacgggtgttgttgcatgggtcagtatttcattcctttacatttccaaataagattccattgtatgaatatgccacaatttttctgtccctttacctgtaggagagctttttggttgtgtgcaatttggggttagtatgaataatgctgctgtgagcgttcatgtgctaattgacaatatgagtccttgttggtgggtgacatccctggccaccctttcatgtctctttttctgtcttcatggcactttccaggcacaattctgctttccctggaactgtgtcattcaggactctgcaaattccctaaagtaggaggaaaaatgaccatgtccaaggtaagtaggacttgcctctcttactgttaaaattccatctcactactcagattgttgtgtgtttttctctgccctgggaagactcaaggagaacagcaggactttgaggatctcttgtcacctggctaatttttgtagtattagtggagatggggt[131 bp omitted]gtaatactgggctgggtgcagtggctcacactggtaatcccagcactttgggaggctgaggcaggcggatcacctgaggtcaggagttcgagaccagtctgaccaacatggagaaaccccatctctactaaaaatacaaaattaactgggcatggtggtacatgcctgtaatcccagctactcggtaggctgaagcacgagaatcacttcaaaccgggaggcggaggttgcagtgagctgagattgggccattgcactccagcctgggcaacaagagtgaaactctgtctcaaaaaagaaaacaaaacaaaaaaagtctagtaatactgaagattggccagtcacttgtgtactgtcactcatttacttctcaaagcagcagaatgaggaggttcctgatctcttctcctaaactcatgaaatatgagaaacctgctcaaaatcagaggcaatcaaggaacaggaatgttagccattctgctcaagtgaaagagagagacgagaagaaagaaaaattctccactgagggtctggtgacctgttgtgtggatgtctggagtgctcccttgagtgatgacatccataggtggcgctgcttctccctgtcctgcgttggtgtgacctcttcttttccagacctggcacctactcaggtgtactcattgttccaagtacccaaggacagtgattaccacagctgttcttatctccaaattcctccttatggcacaagatacctcacacattttttctttggctgggcgcggtggctcacacctgtaatcccagcactttttcggaggctgaggcaggtggatcactaggtcaggagatagagaccatcctggctaatatggtgaaaccccgtctgtactaaaaatacaaaaaaaaaaaaaaaaaaaaaattagccgggcgtggtgcgggcgcctgtagtcccagctactcggcaggctgaggcaggagaatggcgtgaacccaggaggcggagcttgcagtgagccgagatcgcgccactgcactccagcctgagtgacagagtgagactctgtctcaaaaaaaaaaaaaaaatccctaaattcctccttatggcataaaatgcctcaccattttttttttttttttttttttttttgagatagagtctctctctgttgcctaggctg[133 bp omitted]ttttagtagagacggggtttcaccgtgttagccaggatggtctcgatctgacctcatgatctgcctgcctcggcctcccaaagtgctgggattacaagcgtgaaccaccgtgcccggcccgcctcacacattgttaccagaaaaaatgacaacctggggcaaaaatatttaccccttggatagttaaggaagaataaatccagaataagaatcttctaaaaggataaagaaaaaagttcaaacagattggaacaaagaatactaaaaggcaattgtaaaagaagaaatagagatcgccaataatcttgaaaagtggtgatactcatttataataataagtgagaatgatagaatgaattgttcttcctaatcagattacaaaaccatgggaatatttataaactgctcttggctatcataaggagaattagggtacttgtattctgttgaatgattagagaggtagggaaaaaagtgagaagaaagtatgcaattatataatgataatattaaatgtgcttatttttcacattttaattttcatatgaaattattttaaatgagacagagtcagatgttcttacatcttactacttaccatatcatcttggccggactgataatggaaaatatgtgaaattaaatatttattatttagtgtagctaaaaatagatcatcagttccctggaatactatggaaccctgaaatagataatggtaataacagtaataagtaataccagctaatgttcattaaacagtctgtgccgtagacttttcaaaataccgtatatttcttttcttaattcttgaaaaaactcttgtcatgtaagaactattattcagagagggaacaagccttgtaggaaaacatgtctgaggtcacatggttagaaatgggcagactctcagaatgtgcactgaggcattctggcttctgatcaggacactaaatgctgcaataagcatatgtggtttgtgccttgcgagtacagaagacacactgcataactgtctcagggtaccatggagcaggttcactgtgcactgattaccaactcgtgtgagtcctgtgggacagaacacattcacacgcaacagattgcatgaagcagatttattactacagattggcagcaggcgagcccagaagcctagggtccagtatgagctggccatccagggctcaagaaagctacctggagcagatggaatcttgactgtatgtgccccacttgcaccagagctgaggcaccccagaaggtaacctgcccccatttatatacttcagggtgccatgactcatggagaaaaacttgaaggtcatcttccttccaggtgagagaggaacaaagcccagactgtcaaaggcagttcctccccataatattgcattcttagaataatctacagttattcttgagaactacaagcaataaaggggagagagctgggtggggtctgcaccccaactgtcctgcagtccatcccctgacccagatatccctcttagcaaactggtccatttcatatgtccatcgacctcccctggcctcccctgatcttgttagatcagtgtaacaccttgactgacacaatctctgccaacttcatggaattatagctggaatacattccgtggaccccagaggagcatgaccacaagcagcacagccagaccttcctgaagtagtaatcctgcccaggtcccagttatcaaaataagaagctgctgaagataccaaagaagaatcattcaggtggccccagtgtctgaagccagtggacctgcttctgggttgcctctcattgagtttttacaatagctatgtatccagagaaggccggaggtgttggcagttgcagacccactcctcccagtagggctaaaagcacagagcacttgtgttttttgaaccttcctgagggagtgaagggatgttgctgggctcccaaggcagtggccgtggaataaacagtatctatcggccattgcctatggcaggtgtctcatcatttttcatgggaattcacttgtaggtgtaggacataaatctggagctagctgcacctccaggcaggtccccagtcagcctggggcacagctttagccttcttgcccagtggtgcatctcgcttccagggtgacatctaggggcacccccagcatgcctaatgtttgggatctaacagtctgccagctttccaggcatgacattgcccaccctgtatctgggtcaccctccaaaccaaccacagagaaagccataaggctcaggtgcacacagcacccattcccttgtttgggtgttctgtgacccatttgtgggaatggggacattatcttttgccagccacatctcatttttggcacagttgcataaggtcagttcccccagtatgacattcatgcggcccttacagagaggaataccactcatccagtcctggttttcattatgtggaacatttctcatccaggtaatcaaaggaacatggtgcgagaaagcacagtccactgtagctttgttgaggttgtgtgattctgctgccttacaccagttaccacagggccctccagctctctctcatgtggcaggtgccaggttctgacgtgacaagccagggttatggagctgttggtgtgcactgtggcatgaaggatgctggtgtggtttaccatagtcaggatgagagggtcactgtggttggtgatagaataaatgcagggtagcagatggaacacttagccaggtgacatgaggtgactgcagcttgagataaggaatgtgctgtgcttccaggcctctgctgccatatccttgggggaacagcagattaatagctgttggatagtgggtgggctgaggtggtgcagcgacccagtctgtctgtccctgtcctgaggctactaccattgtagacatccattcccctggttgtttggctcagaccttcctgcctcagttgttcagtcaggaagggacgtcacgtcctatacaaaaaatgcctgctagtgccagccacccaaatgggatcaggtgtccccagtaccatcagaaggaccctggtgacccctatggtattccgtggtctcattcttcaccactgtgggatcccatagaagtcaggggatgttcaggaaagcatcacctccagattagagtcaggaggacctttgtcagttaccgcggtgatctgaaccgcaaattaccaacaggatgtgcattataaaggggaaaaggaaaaataattattgggaatactgagattggggtttcacagccacagcctcatcaaccggctgccaggtcgggcagatactgactgaattgctcactgtcgctgggactattagcaaggttcattgaaacctatatacgtgtagcccagtatgcagcatttagactcctagggggctacatacaagtaaactcaatgagttcactaaataagaccacaagacttctttgtcgttggacttctgatgacgcttgggacaatcaaggtgtgtcattgtcaggacacagactagaatgaatgggaattctataagttgacctacatctctgaagatcctgaaaaactttccatttttcctcttggcctcctcaatgttccttctctcccagtaaccattggtagtgagattgaggttgcatatgtttgatgctgtaggaggcagtgaccttcaaggatgtggcagtggtcttcactgaggaggagctggggctgctggaccttgcccagaggaagctgtatcgagatgtgatgctggagaacttcaggaacctgctgtcagtgggtgaggacaggcatcttctataagggaatgtcaggccccaggagtggttttgtatcctagggtgttcaagtttgagtgtgcagtgggaacctaaatttccaataagtgttaccgtgatattatctagaatatgttgggattaagcatgtgacttttcctgtttacagggcatcaaccattccaccgagatactttccactttctaagggaggaaaagttttggatgatggatatagcaacccaaagggaagggaattcaggtaagaagcacgcaactgtgtgtccttgtttgtgacttccatctgttttacttctgtgcacgtccaactccattaccttcttctaaatggccaaacatctttgctggattatgataacctccttccagctagtggccctgctccgtgccttcccactctgacatctgttctcctcatggcagctaaagtgatccttaggacatggatgtcagattgtcattcctcagcttaagagcctttctgtcttcttaattttatgaaagcctctttaagttgcttctagaaacccctgtggtctactcttcatttttcactgcttcttgactacatctcccatactctccctcattctccatcttttctggccaccttgtcatccctcttatttctccatcctgccaaggacactgtatcacctgttgctggtacccaatgaccacgaacttagatgattaaataagaagcatttattatttctctgttctttaggcctgaagtctgacacatctcactgggaaaaaatcaagctgtcttagggctttgttcctttctggatgttcatggggagaaggcttcactttgttttaccagtccctagacactgtccacactccgtggctctagtttccattcctccatctttgaaggcagctacattgcatccttgaccattcttccagagtcatgctccctctgccactcttcttatgcctatgtctttcacctttcaggtcccttgtggttgtattcatcactcctgtatgatccaagttgactttcctactttctgcttagctgattagtgacttcaatgacatctgcagccttaatctgccttgctgtgtaatgtgtcagaatcataggtcctgaaggctggatgtggacatctttcaggaacaattatgttccctaccacagaagcttctgcctcagggccctcacttgcttttctctctgactggagtcctctgttcccacaaaacttactgaccccctctgttagtttatgcaggtgtctgctgagttttaatgtcatggaagaggtcatcttcaagcaccctattgaaaataccatcctatctttacttggcctgcaagtattatgtgtcatatgcttttgtttactgatagatcacctgttccctttcaaatataatctctacaaggtgtttatctgtttgtttatgactgcatcttcagtgcctagaatagtcctagtacatggagggatctgtaaatatttggtatcctgatgaatgaattaatggatggggggacttcactgtctgtaggaatcatggagctagctaataagtaatacatgaaccagagtgtatgaaatatattagtcccttggaagccataggggtttgatttcaggaccccacatggataccgaaagccagagatgttcaagttcctgatatatgtgaagtctttgcctataacctatgtacatcctcccatatactttaaatcatgtctagaccagttataataccaaatgcaatgcctacctgtcacttcattcacaaggattcaacataggactcagtgtgtgagaaattccagttttgctctttggaactggaatttttttccctaaatattttttatgtcctgttggttgaatccatggatgccaaacccatggatatggagggctgattatatattgcagaacagattttttttttctctgtggatggctgcttatccattttcaactttcttaggtttccttgacatgattggttttatgtgtgtgcagttgacccatgtcctgtggaaacttctaagcatagcattttttttttcatgaccacactgagtaatatgccttccctgggacctaccctggagctttccatagggagcatatttatatctgagaagaaagtctttttgaatgaggatttgcagctagctttcctttgagagatttacccatctgcagcccatttgccttttccaaagtcggcccacacttcactgcctccagttcctccttccttcccttagagggggaagaatgaggatgagaggacacaagttatgtagctgaatgttgactctgtttctggtcatctttcttcaaaaatgtgcgtatttcccttttctttacattatgcaaatttaattgtcaaaaagttaaaggacaggctttttgtttatttttatagatttagtgctatattttgaactagtaagctttatgacctggaaggaattggggaattacttactcaaaatagaaacatcctgagaccccttcccatctccttaaagacctcttatttataagtcacagtgtattaaatatatccatgtacctattagacaggattgttcccttgaccatctttgcgggcaggaacttcagggtttgtttcactcagcccaccgctgtcgattccttgcaggagggagtgtgcaagcgagcaagtgcaggaaccggagcaaatgaatgctggaattggctggtcgctcctctctggcgagagcaggctctgttatgcacgccccacagcagtgtccaagcatgttacaacccatgctgtttcagctctgccatctggggatggccaagtgccaatcagctcagtggagcatcagggtagcagcccctgccctcttggcacctgggttcttgtccagcatccaggaagaaccaggtcacatgaactgtgtgaaaggtgatgaacgcagaagactttattgagtggtgagtggttctcagcagaaaaggaggctggaaaggggctgggaaggggatcaacatgttcctgaagccaggccatttgtggctgggcccctctccaaagcagcaccttctgaagttagccacatctatccatactttccgacactcagttgcttctctgctcaccgctcagcgacttgtatccttgccactcagctgcttgtgttgctctgccagctgaaatcttttatggtcacaggatagtggcaggcaggccaaaaaaagcaacattggggcagaaaaatggggtcatctgttttcacttagggctgaggttctaggcttaagggtggagtttggctaggtatactgatgggtacccacttacctattaatattttccaagtttcaacctttggaacttaactctccatcagaaaaatttacctaattcaggacttggtaatatcctgacaaagttttgaacattttgtgagcatgaaccataataagaaacacctctttcagtataacctggacagttttcatgcatgtaggtgtatgtgagtgactttagctgacatttcatgtaacgacacctttcctgcttgtctccacactgtgataattttcattctggctcctttctataaatgtctattgaaggttttaactttatttcagctcactgatgtgtagtcttgaatataaaaacagttaaaaaggcctgtttatctacatcataggctttcttttcattccaagtgattcttcacatcattgattgtctgatgaagagcatcctcctttgtggacctctggaaggacagcctttcagattcccctcagaactgcagttgtctgtctctgtactctttcagataaccaacttatcatccatatcaaaacagaaaaataagattaagtattttatatgtgtcatgcaaaattcttgtataggaatactttcgatttgtagatataaacattctaaggtgtttgatgtttagtatcatgaagggttaaactaaaaagtttaatgggacattttacagagaactgctctcacttcactccaagtgcaaattcggcagtttttcaaaactaccttcacattcaataatttcctagaaagaccctcagaactcactggatgtatttattctcacagttactgatttttacaagcaaaagatgcatattatagttaaccaagggggaaaaaccaaataagacagagtccagtgaagtaccaaatgtggatctcctattgtattctcacagtagagtcgggcatgttacatacccaaaattagcatgtgacttagacacaaggaaccaccaatcagggaaactcaactgagtgctgggatccaagtaattattggggctccattacatagccataattggttggttgattcctgtgtggttatttagtcttttggtccactggttccctgtgacctaaagacctacattaaatcacatcgttattttttctgacatggggaatgccacctgccatttcccatcccccaaagctgtggctagtcacaaccctaaattatattatttcactgtcaagagttacccaagatttgcccccaagcaaacagagagactctcctcaggcatgccccttcaagattctacagattacctctcagatactgaggacaaagtcctgacctctttttagttaggttaactccttttcttatttttaaaaatgttttttaagccatcttaaactgaaaggaaggttaacttctttataaggatatataatatacaggcaaatatacgaagtatttattatgttactgctttcccttagagttccttttgattcatatttcattacgtacataatagtttagtaatttatcatgtaaaatttcagactgagttggaaattttaaaaacagtaacaggttaaatgtatgtgtcatattaattttttattaaaccttttatttctatcaatgattttttatttgaaatgtggtatgtttttttctttcttttcttttttttttttttttttgaggcagagtctcactgtgtcgcccaggctggagtgcagtggcacgatctcggcttgctgcaacctgcgcctcctgggttcaagcaattctcctgcctcagcctcccaagtatctgggattataggtgtgtgccaccacacctagctgatttttgtatttttaatagagacggggtttcactatgttggtcaggctggtcccgaattcctgacctcaagtgatctgcctgcctcagcttcccaaagtgccttggtctcccaaagtgctgggattatgggtgtgagccaccgtccccagtgacatggtatggttttagattactctcatgcaaaccagaaaccagggtgcacttggaaaacacaaactgaacattcgttgaagtttcataccatgtcctaagtgtgaactcttaaaaacactgaacagggcatagcttgtcctgatctcttaattttgtattctgataggaggcaagatccaacctgagatgaagacttttccagaagcaggaccacatgaagggtggtcctgccagcagatctgggaagaaattgcaagtgatttaaccaggcctcaagactctaccataaagagctctcagttctttgaacagggtgatgcccactcccaggttgaggaaggactatctataatgcacacaggacagaaaccttccaattgtgggaagtgtaaacaatccttcagtgatatgtccatctttgatcttcctcagcaaatacgctcagcagagaagtctcattcctgtgatgagtgtggaaaaagcttctgttacatctcagcgcttcatattcatcagagagtccacctgggagagaaactctttaagtgtgacgtgtgtggtaaggaattcagtcagagtttacatctgcaaactcatcagagagtccatactggagagaaacctttcaaatgtgaacaatgtgggagaggcttcagatgtagatcagcacttacagttcattgcaaattacacatgggagagaaacattataattgtgaggcatgtgggagggccttcattcatgatttccagcttcagaaacatcagagaattcacacaggggagaagccattcaaatgtgagatatgtagtgtgagcttccgtcttaggtcaagtcttaataggcattgtgtggtccacacaggaaagaaaccaaacagcactggggaatatggaaaaggcttcattcgtaggctggatttgtgtaagcatcagacgatccacacaggagagaaaccatataattgtaaagaatgtgggaagagcttcagacggtcctcctatcttttgatccatcagcgagtccacactggagaaaagccatacaaatgtgacaagtgtgggaagagctacattactaagtcaggtcttgacttgcaccatagagcccacacaggagagagaccttataactgtgatgactgtgggaagagctttagacaggcctcaagtattttgaatcataagagactccattgccgaaaaaaaccattcaaatgtgaggattgtggaaagaagcttgtataccggtcataccgtaaagaccaacaaaaaaaccacagtggagaaaatccatccaaatgtgaagactgtgggaagcgctacaagaggcgcttgaatcttgatataattttatcattatttttaaatgacacgtaagtgttgtacatatttatggggtacagtgtgatatttaaatatatgtatatgatgtataatgatcaaatcagtgtaattagcacatttatcacctcaattatctcttttttgtgttgagaaaattaaaaattcattgttccagcagtttgaaaataaattgttgtcgatgatagtcacctttagtgctgcagaacagcagaacttcttcctcttatctacctgtacttttgcatccattagccaacctttggccatcccacctatcccttacccttccctgcctctagagccactgttctcactacttctaagaaatcagctttttaagcttccccatgtgattgaggacagtttgaagttagtgtttcagccatagctcagcataccccagtggtcgtgggactgtcagagcagagaatgctgcagggtttctaacagaagtttgacaattagttattattcaggagacaggtcttagtataagagtttgttcacacactttcaaaacactaatgatgaacatgtcaaaattgatgaccactagaatgtcagccacatgtgtctttgtatttttgctgcatccttacattgcttgagtctggaagattgaggctgcactgacctatggtagtgctactgcactccagccagggcaacagagtgagaccctgtctccaaaaaaaaaaattaaataaatacctttctttgtttctagacaagcatctctctgtgtttctggaattttttttttgagtgtacatacatagtgtgttacaattatattcttattttcttcagcagtgaatatttgctggtatttttctattttataattgtatgcattatttttagatttctcagtgaacatcagaaaccccatctctacaagaaatacaataattagccagttgtgttggtgtatgtctgtagtcccagctggagactactggagaggctgaagtgggaggatcgcttcaacccaggaggcagatatatatacaaatggaatagaagtgagagtccataaagaaacccatacatctaaggccacttgattttcaagaaggatccaagattactttatggagacagaatagtctcttcgaccaatactgctgggacacctatacacagacacacaacataatgaagttagattgtacctcaccctacacttaaaagttaactcaaaattcatcagtgacctaatgtaacagctaaactataaaagtattagaagaaaacatagaagtaaatcttcctgactttatttggaatggattcttcaatgaaacaacataagcaaaagcaaatataaatacctaaatgggacctaggttttaaaaaatgctgtgcatacatggacattgtcatgaacatgaaaagaccatacagcatgagttctactatccagattatataaagaattcttacaactcaataacagaaaccactcaattaaaaaaatgggcaaagggctgggtgcagtgtcatgcctgtaattccagcactttgggaggctgaggtgggcagtttacttgaggccaggagttcaagaccagcctggccaacatggtgaaagtctgtctttactaaaaatacaactagctggatgtggtggcctcctgggctcaaaccatccttccacctcagcctcttgagcagctgagactacaggcgtgcaccacagcctctggttaagttttgtatttttttatagagatgaggttcctccatgttgcccaggctggtctcgaactactgcactcaagtaatctgcccacctcagcctcccaaagtgctgggattacaggcatgagccactgcactcagcctaaaaaaaaaaaatcctaatttttatgggtacacatatggagtatatatgttgatacaggcatacaatgcataataatcatatcagggtaaatggggtatctgttaccacaagcatttatcagatttttgtgtgtgttagaaacaatccgtactcgtttagttatttcaaatgtacaataaattattattgactgtaactctgttgtgctatcaaataccagatcttattcattctatctaagcatagttttgtacccactaaccatccccacttccctcaccaccaaccttaactttccctccctctggtaaccaacattctgctctctgtctccatgcattcaattgttttaatttttagctcctacaaataagtgagaagatgtgaagtttgtctttctgtgcctgacttatttcactgaatgtaatgtccttccaattccatccatattgttgcaaataacaaaatctcattctttttgtggctgaatagtactccattgtgtatatgtccatttcctgtatccattcacctgttgatgcatacttaggttgcttccaaattttggttattgtgaatagtgctgcaataaacattgcaggggagggtgcagatatcactttgatatagttttaattttttgaggaacctccatactgttctccgcagtggttctactaatttacattcccaccaacaatgtgcgaggattccctccttcactccttccacatcctcaccaacatttgatattgcctgtcttttgaataaaagctattttaactggagtgggatatctcatggtagttttgatttgtatttatctgatgatctatgatgtagagcaccttttcatatacctgtttgccatttgtatgccctcttttgagaaatgtctattcagatattttgctcattttaaaattgatttattaaattttttcctatttggtttgagcttcttatattctggttattaatcccttgtcagatggatagtttgcaaatattttctcctattgtgtgggttgtctcttcactttgttgattgcttcctttgctgtgcagaagcttcttaacttgacgtgatcccatttgtccatttttgctttggttgtctatgcttttggggtattactcaagaaatctttgcccagaccaatgtcctggaacatttccccaatgttttcttgtagtagtttcatagttcgaggttttagatttaagtctttaatccatttcgattttatttttgtatatggtgaacaacagggttgaagtttcattcttctatatgtggatatcatgtttttctagcaccatttattgaagagactgtccttttcccaatatatatacttagcacctttgttgaaaatgagctcactgtaggtgtagaaatttatttctggattttctagtttacgcagcactaaaaagaatgtactgtacatgaagtgatttctaggatatgttgttacatgaccatagaagagttagaaacgtgctttcttttaagtaataatggaaaataagaaatctacacatactgatacggtttggctgtgtctccacccaaatctcatcttgaattatagctcccataattcccacatatcatgaaagggacctagtaggaggtaattgaatcatgggagtgggtctttcccatgctgttctcgtgatagcaaggacagatagaggagtgactttgaatagaatgggaggcaggtttgccctaagcgatttccagcttgagatttccttagtgattttgggggcccaagatattttcctttcacaatactaagcagtttaatttctcttaaatgtggcatttccacgtctaaagaatattaatatgaaaactttaaaagtgggaagatagcttttccaggagggcaattggccctccatattggcccttgacagggcaggagcatcgccatcttggacaaacactgccattttaaagttcgcgttgatcaaaaactgcctaaatccaaagggcatcagcctaatggctaaggtcagcatgaccataaaccacaaatgacatctccaatcagaaacattccaaccataagataaacccctccctgaccagagacatgccagcaccgagataacctcccttccattggagagatgtcagtcccaagataacttcccctccaaccagagatattccaaccccacaacagacttctccccaatacagaaacattctaagcctgtggtaagctctctctccctaaagccaatacatactcttagtccgtaagagagagcgctcctgactgcaatcggccagaaggccctctcggtttattctccaaaacgaacctgtctttgactgttgagccgcttttcgtgttttttttttttttctctttaactcttacagccctcttaaacacttaaactgtggttgtttttcttgccaaaccagtggtacaacagtgtctggttgtaccaggggctggtgccccactcaatgcctctcccaaaccatttttcctggcccattatttaagctcttagatttagcctcatactattagcgtctagtatattagcctttcagccatctcctgaccgctccacagtcactccccgctaactccttgaagattgtatctccttgctttgttctctttcagtaacactcctgtcatcatgggaggcgtgtagacttcaggaattcctgtctattcaatattttctctcgaggacgcagggagagggaaggaccactctcagggccacagtccatattccaaaccaggcgcttgggtctatgggattcattcctcgtgggcattgcaggaagtgtagtcaaagagcaccgcggagtcccacgcttcccgccggaaggtgatactatagaacgtctcctttgagattcaaggaagtgtagcgcaggagatctgttgaatgacgagcaagtaggctcaggacggcgtatccggggaattctgggaaatgtagttcacacgctgcgcggggtaggggcacttccgctcccggggggcgaggttgctgcagtgcattcggtggtagtttggtgtcagtcctgtgtcttgtcggtccttctaaacgtgtccccttacgatgctggctcgcaaccacctggaagttgactaaggggagaaggagtctcgttggaaaacggaggtttggagggacaacggcctctcttttcgttcttgtcagcggagccttcttggtcttggggctgtcctcgcgtccccgggcatgaggctgggggttgggacttggtcgggacgcgtctcgcctggtttgagggtttttggggctctcagctcgctcagtccgcctccctccatcccacctgtgaggctactttctcacaatttagggttgggatgttattaatctccctgtacctcccactgctgttctttaaaatggggactttaggaccatcctaatgaaatcgttttgggaactggaagaggtaacacaaatgaaagccttaaagcagcccctcccttagtgactggtggtctcttcttagtgtttatttcccacgaagcctgtcaggtccccgggtggggtcagagctccatctgcagggatccccgcccttgtctctgattcctgcaggacgctgggtgatcccggacgcttctgacctctttttaggaaggcgagggttgtttccatttccacgaagggagaggaacatttaacttttatgccggacggcaatgcggtcagggtgtttcacagctttctccttccccagcctgattctcaaaaagagctgcagggagggacttcttggctactgagggcaaagttccacgagagtggtccttggctttttttcttttacagagatgctcaccccgaccaagagtgtaggatgtgtcctcaggcatgggtgttgataataattaagcctcaattggtaactttatcccaagagctttatacaagtagtcacattttcgccacaccgtggctctgtggagaggtactacttttttcagttttaaagatgagtgagatacaaaggagcaggagttatctgagaatagtcacctaagcagtaagaggtggagctgcggttgaaacctgggcgttacaggtcagagccttagttgataatcttttggatacattctcattgaggcagaggaactagctggaatctagtggggaaagcaagctaggacttgattgaagggagccttgagagcaaggcttatgggcttggactgttctgggagtttatcaactatttcattcattagaactatttcatttattacaaatatttcacttgttatgcagcggtatgattgtggagcgttcagaaattggagaaatacgagtagtacaagtttataattacccatgaatccagcatgtaaagatagtaactgttaaacttcgagtgcattttttttttttttttgagacagagtctcactgtgttgcccaggctggagtgcagtggcacgatctcggctcactgctaactccgcctcccaggttcacgccattctcctgcctcagcctcctgtgtgagtagctgggaccacaggcgcccgccaccacgcccggctaatttttttgtagttttagtagagatgaggtt[148 bp omitted]aaacatttaaacaaaattttatgattaaaaaaatgtgttttcccttatgtgtttaactatggaaatttggaaacactgccaagagggaaatagctagtgaacttacatgttatatcatgctcatcctaatttatctcat[142 bp omitted]agaaactccatctctactaaaaatacaaaattagccagacatggtgacgcatgcctgtaatcccagctactcgggaggctgaggcaggagaatcgcttgaacccgggaggcggaggttgcagtgagccaagattgcaccattatactccagcctgggcaacaagagcgaaactgcatcctctgcctcccggtctcaaaaaaaaaaaatatttaacgttttattttcatatcatttgaaacctatagaaaaattgcaaaaatagtgttagaaattctcatatactctttacccaaatttgccaaatgtttacatttttcctgtttgctttgttcttgctgatcacccagataccaccaggaacatacctgtagccagagacagttgcttgtagctttctgcagcaaagaagcccacatttcaagataattgtggggtgtcttggtaagaggtgtttagaaagggctggttatagggtttcacataacatgctagatactattagatattatactggctaggcatggtggcttatgtctgtaattgtagcactttgggaggccgaggcaggtggatcacttgaggccaggagttcaagaccagcctggccaacatggagaaaccccatctctactaaaaatacaaaaattagctgatttgtccactgtgaagttacttttttaaaatttgagggggcgtgcgcctgtaatcccagctattagggaggctgacgcataagaatcatttgaacctgggaggcagaggctgcagtgagctgagatggcgcccctgcactctgatctggatgacagagtgagactctgtctcaaaaaaataattaaatattatattaaataatattgttatctattacatatcacatctgttaaaaagctaataatagtagttgtagtgtcatttattagatagtgttggataccatattacataacgttgttatctaatctgcagcttccatatttaaatttattcagtttcttcttttggtccttataactatcccttgccccactttttacctgtaaccccattcaaagtccaattttatgcattgtctttattgtcacatttctatacttttgtttaatctagaaggattccacagcctttgtcttttatatgcatggttttttgaagagtataggcaagttgttttgcagaaagacattcatttggggtttgtctggtaaatttcatgtttacgtttagagtatgcatgattggcagggataccatagtagtggtgagatgtccttttcattgcaacctaacagtgtccaaatgatgttggtttgtcccttcactggtgatctcaactttgttcacttggccaagatgaagtctttcagatttgtccactgtgaagttactttttttaaattttgaaaataataaagttccttatggggagatacatgattagtggacattctactgtaaagaagagtttccatttctcccccatttattcattccttcattcaactataaatattctattgatatggactcagaattcagtcttactgatttcaatgacatgtagattaacaattattttttccaattctatcaagatgtatttcacatatagctttcacccatttcaggcatggaactccgtgatttttaggaattttgtgaagtggaataaccatgatcatgattcagtttagatcatttttatctcccagttggactccttgtgcccatttatagttaaacctcattctcatctcaaatgtgaagcaaccactaatctactttctctatgatacatttgcctattctgaacatttcatataaatgcgatcacacagtccatgggtttttgtgactgccttctttcatttaacataatgtttccagggttcatgcatgttgtagcatgagtcaatatttcatttctttaaatttccaagtaagatttcattgtatggataggcgacaatttgtccatttacccataggaaggcattttggttgtgtgcaattttgggttattatgaataatgcccctgtgaacattcaagtgctaattcacaacacatgttcatactgttgggtggcatcactgaccaccccttcatgtctctttttttttttttgccttccatggcatgtttcaggcacaattctgtcttctcttgaactgcataactgagaactctgcaaattccccaaagaaggaggaaaaatgaccatgttcaaggtgagtaagtctggtctcttttgctgttcagattctgttttgctacttaagattgtcacatgtttttctcggtcttgggaagactcaaggagaacaacagttatttgtgcacctgttgtgtgccagatgcttccttgtttcttttgtgttgaatttgcgtttggatttgattttgtttacttttaccattatttatgttatgagtagaaatttagtgggaaggaacaattctcccatttcactacatcttttctcactaattaggcatttttattttctcatgctattcctcatgtatattcataactgtatttgtattgatacttatctaatttaaattgtgttctttgtgtttaatattatgtaatattcattatttatggttgcatcatgttcccattgaattgatgctcctttttttttttttttcctcgagacagagccttgctctgttgcccagactggagtgtggtggcgcaatctcggctcactgcaacctccgcctcccgggttcaagcgattctcctgccccagcctctcaagtagctgggattacaggcgctcaccaccacacttggctaatatatgtatttttagtagagacggggtttcaccatgttggccaggctggtcttgaactcccggcctcaagtggtctgcctgcctcagcctcccaaagtgctgggattacaggtgtgcaccactgcacctgccgatgtttctttttaactactttatactcacaggcactaggagctcagttttgaaagagtacttttgacatgtgccacgttggttgttttgtagataaaatatccatatgtggcatggcacagcaggctgtaactgtggcttcacacaaggatttctggagattttcacataggaagagctagcttttgttttccccatgcttaagtcatgcattgtgtgtatgttatttactggtcttttcttattcctttatgtattaaggagtttgaccaaaatgcagcatcctgggctgcacatatatcggtttcggtgaatcttgccagttgctccagcaacatttagcaattcagtctcaactttgtttgataatgcccagggttctcgtacttgaaccctggatgtaatcatttttctgtcttttttttttttttttttttttttagttttttagttttggtagctttagtttcaaatgtccatgatatcagaagattctctagtcactgtgttctattcctttgtttgttcctcagaacagctgaatgatgcagttctcagcctcatcttcctcttaaatatgtgaaatatgagaaacctgctgaggttcagagaggaaacctagggtcggcatgttagctattttgctaaattgaaagagagagagaagaagaaagaggattctccattgaaggacctatgccttctggtatgggtgtctggagtgccctcttgagtgatgacaaccactggtgacatagctcctccctgacccctcctcgggggtcctcttctcttcctgttgtgccacctcctcaggtgcacctagtactccaggcaccaaaggacagtgattgctacactcactatagaaaatctttaaattcctaatggcaaagatggcttatagagtgttaccagggaatataacagcctaaggtgaaaatatttaccactttgatatctaaaaaagacataatccaaaataagaatcttatgtacagaatggagaaaaaaattcaaaggaatatgaataaaggacattaatacattaattggtaaattttagagaagaaatagaagtggccaatacatatttgaaaaggtgatagtattatttatattcaaatacatgggattaataaggtgaattctctctaatgagattatcaaaatcacaggaaatttgataatctgcttttggctattttaagaaaaaccagggtaatatatccccttgaaagattttggagtttgagaaaaaattgagatctgacatatatgatcacaattttaaacattcttattttttgacactttaattttcatttgaaattattgtattatagtttattcttattctttagagacagagttttgctctgttgcctcggatagagtacagtgatgtaagtgtagcccactgcagccttgaacccctggggtccagatcttcctgccccagcctcccaagtagctaggactacgggcacgcaccacgatgcctggctagttttaaaaatttataaagttggtgtcttgctgtgttgcctggtctggtcttgaactcttgaattcaagcaatccccccaccttagcctcttaaagcactgggattacaggtgtgaatcactgcacctggtttgaaattattaaattaaactaaattattattttattttatttcttttttgaaatagagtcttgctgtgttgcccaggctggagtgcagtggcgcaatcttggctcactacaacctccgcctcctgggttcaaacgattcttctgtatcagcctcccaagtgtctgggattatagtcacgtgccaccatgctcggctaatttttgtatattttgtagagacggagttttgctatgttgccaaggctggtctcgaactccagaggtcaaatgatttgcttgtctcggcctccaaaagtgctgggattacaggcatgagccaccatacctggccaaaattattttcaatgatcagacgggagagtaaggtccacatacatgattttctttgcaggattggtattaatgaaaactacataaaattaaatattcattatttagaataaagatagatcatcagttccctgtaatagtatgcagacatgaaatgaaatagataactataatgaaagttataataaaaaatccaaagaaatacgaataaaggacattaccagccaggtgcggtggctcacgcccatattcccagcactttgcggggctgaggtgggcagatcacctgaggtcgggagtttgagaccagcctgaccaacatggagaaaccccatctccaccgggtgtggtggctcatgcctgtaatcccagcactttgggaggccaaggcaggcggatcacgaggtgaggagatcgagaccatcctggctaacatgatgcaaccctgtctctactaaaaatacaaaacattagccgggtgtggtggtgggcgcctgtagtcccagctactcgggaggctgaggcaggagaatggtgtgaacccaggaggcggagcttgcgttagctgagattgcaccactgcactccagcctggggacagagtgagactccatctcaaaaaaaacaaaacaaaacaaaacaaaaaacagcaaaaaaagagaaaccccatctctactaaaaatacaaaactagctgggcatggtggcgcatgcttgtaatcccagctattcaggaggctggggcaggagaattgcttgaactggggaggtggaggttgccgtgagctgagtttgcgccattgcactccagcctgggcaacaagagcgaaactccgtctcaaaaaaaagacaaaaaggtaataaaattaactaatgttaattaaatacctagtctgtgccacagactttccccatttatattctcttgcttattcctggagaaaactgatgtgacagtctttatacagaaaggaaacgaatgcatgtaggcaaacttatccaaggtcacgtggctgggaaggcaaaggcacagagccttgggattgagccttgtgagtgagcacacacactcagtgtgatcataggcacactggctccagatcatgacattcagtgctgcaattaatatatgtagtttgcgtcttgaatacagaggacccactccatggctgtcccacacaggtcactgtaaacttgttagtttggcagatattaaaaaaaaaatgggccgggtgtggtggctcatgcctgtaatcccagcgctttgggaggccgaggccggcaaatcgcctgaggtcgggagttcgtgaccagcctggccaacatggtctctactaaaaatacaaaattagctgggcatggtggcaggtgcctataatcccagctattcaggaggctgaggcaggagaattgcttgaatccaggaggcaggggttgcagtgagctgaaatcgcaccactgcactccagcctgggcgacagagtgagactctgtctcaaaaaataaaaagaaagaaagaaaaatgattacatccagggttcaagtacgagaaccctgggcattgtcaaacaaagttaagactgaattgctaaatgttgctggagcaactggcaagattcattgaaacctatatatgtgcagcccaggatgctgcatttagagtcctagagggttacttacaaggagacttaataagtgcacaaagtaaacctatgggactttttcatcattgcacttctggtggagctctggaaaatcagtgtcattgcgaggatacagacagaatgaatgggaaatctgtatgttgacctacatctttcaagatccacagcaacttctcacccatccccttcacctgctcattgccacccttctcccaggaatcactggtcatgagattgagattgcatacgtttgttgttgtaggaggcagtgaccttcaaggatgtggctgtggtcttcaccgaggaggagctggggctgctggacgtttcccagaggaagctgtatcgagatgtcatgctggagaacttcagaaacctgctatcagtgggtgagcacaggcaccctctgtaatggaacatcaggccccaggaatggctttgtatcctagggtgtttgtgttagtttgttcttatgctgctatgaagaaatacccaagactgggtaatttataaagaaaagacatttcattgactcacagttctgcatggctggtaaagcctcaggaaacttacagtcatggtggaaagccgatgggaagaaaggcacctttttcatattgcagcaggaagaagtgccgagcaaaggggaaaaggccccttataaaaccatcagatagggccgggcgcggtggctcatgcctgtaatcccagcactttgggaggcc[136 bp omitted]aggcggg[135 bp omitted]ataaaaccatcagatctcgtgagaactcatccactatcacgagaacagcatggaggaaactgcccccatgatttaattacctcccaccagctccctcttatgacatgtggggattatgggaactacaattcaagatgagatttggggacaccgccaaaccatatcagtgttcaagttcgagtgtgcagtgagaacctaaatttctagtaaattttacctaagatgtattgggattaagcatgtgactttgttcacagggcatcaactttcccaccgagatacttttcacttccaaagagaagaaaagttttggatcatggagacagcaacccaaagagaagggaattcaggtaagaaccaagcaacgatgcatccttgtacgtgacccttccatctgttttacttctgtccattgcccaactccattgccctggtataaatggccaaacctgtttcctggattcttacctccttcctgctggttgtcctgctcccccaccccctcttcccaccctgacatctgttttcctcatagcagccaaagtgatccttagggaatgtaagtcagattgccattcctcagcttaaaagcctttatggcttcttatttgtgttaatgttacaactgctttaagtgccttttagagacccttgatctgctcttcatcccctactgcctctctgactacatctccattttccagccacgttgtactccctgctgtttctccatcctgccaaggacactgtattgcctgttgctgtcacccagtgaccacacacttagcagattaaacaacaaacaattatctttctgttcttcagatctgaagtctgacacatctcactggacaaaaatcagggtgtccctagggctttgttcctgtctagatgttcttggggagaagccttcactttaatttaccaatccctaggcactgtccacactccttggctcttgtctcccttcctccatcttcaaaagcagctacattgcatctctaaccattcttccatagtcatctgccacccttcttaagcctctgttttccacattttgggtcccttgcgattggattggtcactcctgcataatctagaatgaccttcttactctctctttagctgactagtgaccttaattgcatctgcagccttaatatctcttgctatataacataacaggttcataggtcctgggaattggatgtggacatctttcaaggaccattgttctgtctactacagaagcttctgtcttagagtttatatatgctcttctttctgattggaatactctttcacctcaagaccttctgacccttcctttattctggtctctgttcagttttaatatcatgagaaaggccttctctgaccactctatttaaaataccagccgggcgtggtggctcatgcctgtaatcccagcactttgggaggctgaggcaggcagatagcatgaggccaggagtttgagaccagcctggccagcatggcaaaacctgactctactaaaaatataaaaattagctgggtgtggtagcacagtcctgtaatcccagctactcgggtggctgaggcgtgagaatcacttgaacccaggagccagaggttgtagtgagctgggattgtgccactacactctagcctgggtgacagaatgagactctgtctcaaaaaataaataaagaaatatatatatatatatatatatatagagagagagagagagagagagagagagggaatggaataccatcctatctttacccttctggtgttgtcttatactgtgtcttatatatttctatttagctgtcatctctacccactggaatggaatgtcttaagaggaggacttttagctgttcaatttttattttaagattcagggggtacatgtgcaggtttgttacctgggtatattgtgtgatgctgaggtttgcattgcaaatgatcctgtcacccaggtactgagcatagtacccaatagtggtggcaggataaccctcaggttttaaggctatgtgtaccggtgttagaggtagtggtgatgggctgggtgggccagtcctgaggcccccacatggtgtgtgcaggtgagtgtcagcggtgatggtggcagcaggcttgtaggacctgtcctcaggtcactaggaggagtatacagatgccagtggtggtgatcagggcagggaaatccttaggtctccagacagcatgcttgggcacctgcggcagggttctgggtctgttgtaaagctccctgcatggtacatgctcatgcctggggcaaccaacatggcagggtgatctcaacagccccaggtggtatgcttaggtagtggaggaatgacgccaggccaggtgagcctgtcctcaggcctttcagtggtgcaggcagatgtaggctgtggtggaagaggcggcgtgatccctaggtccccagatggcatgctccagcactggcagcacacaagctgggtctttgtcaggtctcctgtttgtgcacacatgtgcctgaggcaacacagggtagagcaatccccaggtccctctgtgtcatgctctggcactgagatgggcggtaccaagtgaagtgggcttgtcctgtgcacgggcacaggttgtggtgggcagtgcaagggactccccatgcctttaggaggtgtgcttgggtggcagtggcagagtgtgcagagaaactttcctcagaatgagaacacatatgagtgtacagtggccctgctgctgggggtgaggtagcattgccgttagaggcagcagccccagacaggcagctttcaagctctggtgagtgcacacactttgggtccctttgtactgtactgggggcagcctccctggtgtccttcacggcccattccctagagtatgggacactatgtggcctagattgctggggactctgccatactgctgggtctaacaggcattattgtaaccctctgggtggatgtgggggcatgtccatggggcttcagggatttggagatgcaaaggctgttgggccccagggcaagatgcagtctggtgggggtgcagctctcaaaatagcgctgtgccatagctgcttgagtctcaggaagtgtgtgggtcccatcatgagtaccctctctgagtgccattgcatggactccaggtagccccctgtgctagtctcagggcccacaggggtcgagggcctctctcatggctgattgctggagtgcacagcggaaatgtaaaccactagggctctctcacttaccctttcccagcactaggagcctttcccggctttcaggtgatcacggccagaagggctacctcccttcgctctccttttgtgcttcgggtgtttcctgtcacttctctgctgaattccagtgatccctcttagatgctatttgatgtatgagtatctatttgctttttaaattttttagtaataaaatatatagaacacttcatgaatttgcatatcggccttgtgcaggggctgatcattccagttttaccatatgtgctgctgaagtgagcactactcattattttggctctttgtggaggacgcaagctctgggtgtctttagtcagccatcttgaagtcctcctacccttaacgttccttctgattcatcacatatataatttagtagttacataatataccatgcaagattttagactaactaggaaattggtagaaatagtaacacattaactgtattatattaatattttaaattaagtctttcatttctaccacgtatgagacattatgtcattcaaaattggtttcgtgacaacgagagaccgtggtgcacttggaaaacacaaactgtaccttccttgtattcagtaaagtttcaggccatgtcctaagtgaaatcctgaaaacactgaacaaaggtttcacttacccacatctcttaattctgtgtccttataggaggcaagatccaaactgagttggagtctgttccagaaacaggaccacatgaagagtggtcttgccagcaaatctgggaacaaactgcaagtgagttaactagacctcaagactccataagtagctctcagttctccacacaaggtgatgtcccctcccaggttgacgcaggactatctataattcacataggagagacaccttctgagcatgggaagtgtaaaaaattcttcagtgatgtctccatccttgatcttcatcaacaattacactcaggaaagatatcccatacatgtaatgagtacaggaagagattctgttatagctcagctctttgtcttcatcagaaagttcacatgggagagaaacgctataagtgtgatgtgtgtagtaaggcatttagtcagaactcacaactgcaaactcatcagagaatccacactggagagaaaccattcaaatgtgagcagtgtgggaaaagtttcagccgtagatcaggaatgtatgttcattgcaaattacacacaggagaaaaacctcatatttgtgaggaatgtgggaaggccttcattcacaattcccagcttcgggaacatcaaagaatccatactggggagaagccattcaaatgttatatatgtggtaagagcttccatagtagatcaaatcttaataggcattccatggtccacatgcaagagaaatcatttagatgtgatacctgtagtaatagctttggtcagagatcagcacttaatagtcattgcatggaccacacaaaagagaaactatacaaatgtgaagaatgtggaaggagcttcacttgtaggcaagatctttgtaagcatcagatggaccatacaggagacaaaccatataattgtaatgtatgtgggaagggcttcaggtggtcctcatgtctttcaagacatcagcgggtccacaatggagaaacaacattcaagtgcgacggatgtgggaagagattttatatgaattcacagggccattcacatcagagagcctatagagaagaagaactgtataaatgtcagaagtgtgggaagggctacattagtaagtttaatcttgacttgcaccagagggtccacacgggagagagaccttataattgtaaggaatgtggaaagagcttcaggtgggcctcaggtattttgagacataagagactccatactggagaaaaaccattcaaatgtgaagagtgtgggaagaggtttactgagaattcaaaacttcgtttccatcaaagaattcacactggagaaaagccttacaaatgtgaggagtgtggaaagggattcagatgggcctcaactcatctaacccatcaaagactccacagcagagaaaaactattccaatgtgaggattgtgggaagagcagtgagcacagttcatgccttcaagaccaacaaagcgaccacagtggagaaaaaacatccaaatgtgaggactgtgggaagcgctacgagaggcgcttgaatctagatatgattttatcattatttttaaatgatatataattattgtccatatttatgggttacagcatatttcaatacatgtatacaatgtataatgatcaaatcagtgttattagcatatccatcacctcctttatcatttatttgtggatcatttatcatttctttgtgctttgaacgttcaaaaactgctgttctagttatttgaaaataagttattattaattatagtcacctttagtgctgtggaacactagaacttgttcctttcatcatcttactgtactttcatatctgttaacgaatctttcatcatccaccctctctcctacttttcccttctagtaattgctatgccatgctgcttctgcttttttttttttttttttttttttttgagaacagagtcttccaggcttgagtgtagtggcatgatcctttctcactgcagcctccacctcctgggttcaagcgattctcctgcctaaacctcctgagtagcagggattacaggcacgcaccaccacgcccagctaatttttgtacttttttttttttttttttgagacagagtatcgctctgtcgcccagtatggagtgcaatggcttgatctcggctcactgcaacctctgcctcctgggttcaaacgattcttccctgccttggcctcccgagtagctgggactacaggcgcccgccaccacacctgactaattgttgtatgcgtagtagagatggggttttg[142 bp omitted]accacattggccaggctagccttgaactcccaaactcaaatggtccacctgccttggcctcccaaagtgctgggattacaggcatgagccaccgtgcccagccaatgctatgctgcttctatgatgtcaactttttagcttccacatatgtgtgaaaacatgtggtatttatctttctgggcctgaatttacatcactcaacatcatgttctccaaagcttatctttatcttgccataaatgacagaattttattattttttatggttaaatagtgtacctttgtgtatgtatgccacattttctttaccattttctgttgatgaacacttagattggttccatatgttagctattgcaaatagtactataataaatataggagtgcagataggagttcaacacactgatttcctttcctttggatatacagctagtagtgggattgctggatcacttgaatgctgatatgcataagaggatctacactggagaaaaaccatggaagtgtggagattgtggtacatgcttcagtcagggctcacatcttcaaattcagtgtctgttctgtagagaaaccttaataatgtgatatatgtgacagcaaagagttataagatatgaatatgttaattttagtagatacttccgaaaagtatttcaaactggttgtaccactataaactctgaccattattaggcaagaattggctttttttttttttttcttttgagacagtcttgctctgtcacccagactggcatgcagtggaatgatcacggctccctgcagccttgacctcccaggctcaagaaatccttctgcctcagcccctcaaaagctgggactataggcatgcaacaacacgcctggctaaatttttgttgtagagatggggtctcactatgttgcccaaattggtctcaaactcctgggctcaagcgattctccctcctcagccttccaaagtgctgggattacaggcctgagccatgcgcacagcattttgttttgttttgttttgtttttgagatggggtctctcggtgttgcccaggctggattgcttattcacagatgcagttacagtgccctatagcctcgaactcctgggcctaagtgatcctcttgcttcaatcccctgagaagctgggactacaggcatggaccaccacccctgattgatcttctttagtttctataacaaaatagtacactgtttccacaaacttgggaaggctagtatttgggggtggggggcgtggaaatcactaaacaacaaagaaaatctgatgaattggacagcataaaaatattggcataaagatgaacataacataagcaggaatatttaaagcacatactttttatagagtgtctcccctgtaatgtctctggttaaatgaaagggtttcaaatgtgaagacaaccctaaccatactcattatctgtaaaagatgtagcattgtcatggactccttaataaacgtgaagactttaatccatctgaaggtgcatcacatttctgaagtttccaacactgacaaggtgatgggcttatggatgaaaactcatgaatgggaaaaactcagctatcgttaaagcccatatattttattaaagatattggggctgtctcctaaatctagttagtgatgaatttcaagtctagagccatcaccgaatccttgtccacattcattacacataggttttctgagaaaattgtctgctggttatgagaggtcttctcccgtgccaaagtgagtataataaccttgcttttggccaggtgcggtggctcacacctgtaatcccagcgctttgggaggccgaggtgggcagagtgcctgaggtcaggagtttgagactagtctggccaacatggtgaaaacccatcactattaaaaatacaaaacaattagctgggtgtggtggtggcgtgtgcctgtaatcccagctactcaggaggctgaggcaagggaattgcttgaaccagggaggtggaggttgcggtgagccgagatcacgccactgcactccagcctgagtgacagagtgagactccatctcaaaaaaataaaaataaaaataaaagtaaacaagcttgctttcttttatgtgctccttgattttgatggtgatgtgaaatcaaactgaagctgaaaatacaataatcacatttatacagggcatttttcaaggaaatttattgatttttactttaataatttagtgcctcacttttgtaagtctcttgtaagtggccaggcatggtggctcacacctgtaattccagcactttgggaggctgaggcagaaggatcaattgaatctaagagtttgagaccagctttttacagagtgtctcccctataatgtctctggttaaatgaaagattttcaactgtgaagacaaccctaaccatactcatattctagttcctttgcctttccatataaattttagaataattttatatctacaaaatatcttgctggaattttgatagtaattattttaaccctgtgtatcaatttggggagaatgaacatttttgctatattgagtcccacgatcctcaaacatggaatgtgtctccattcatttaatattgttggattttcttcatcagtgtgttgtaattttcatcttacaacccttgtacatcttttgtcaaacttccatctaggtatgaactttgatttccgtgtgttcattgctagtataatatatataaattaattttggtatcctgatcatgtatcctatgatcatgctgaattcgcttattgtctaggcattcatggattggaagacttcacatttttgtgatgacagtactacccaaaccaatctacagttttactgcaatcactatcaaaatccaaacagccttttttttttttgcagaaatcaattcataaattcatatgtaattgtaatggaggcaaatagacaaaatctttcttttttaaaggaacatgatggatggctcccacttcatttcgaaacttactaccaagctatagtaatggaatagaatttagagtccataaagaaactcatacatctaaagtcacttgattttcaagaaggatccaagattgcttaatggagaaagcatagtctcttcagcaaataatgctgggcaaatatatatacatatgcaacataatgaagttagatccgcacttcacactatacttaaaaattaactcaaaatgatcaatgacctaaatataagaggttaagctatacaactcttagaataaaacataaaggttaatcttcaagactttttatttggaatggattcttagataagacaccatatgcacaagctaaaaaaaccccacataaattggactagagcaaaaaaaaaaatgctatgcatacagagacattgtcaagagcatgaattcttctagtatcagaatatataaagaactcttagaccaggtgaggtggctctcacctataatcccagcactttggaaggctgagatgggtggatcacttgagcccaggagtttgaggcctgcctgggcaacatggcgaaaaccatgtctctacaagaaacaaacaaacaaacaaaaaacaacaacaaaaaacaaaggtagccaggcatagtgacccatgcctgtggtcccagctactcaggaggctgaggcagaaggattgtttgagcctgggaggtcaaggctgcagtggggcgtgatgtaccattgcactccagcctgggcaacaaagagagactctgtttcttaaaaagaaaagaaagaaagaactcttacaactcaataacaagaggagaaaccacccaattttctaatgggcaaagatacaaatagaaatttcagatatacaagttaccaacaattatgtgaaaagatgctcaactattagtcattaggaaaatgcaaatcaaaccaataatgagatgccattttacaacagctatgttagctatcatctttaaaaatagaaaatagccgatgtggtggcaggcacctgcagtcccagctacttgggaggctgaagtaggaggatcgcttgagcccaggagttttgaggtgtagtgagctatgcccactgggtgtccacactaagtcgacatcaacatggtgatctcccaggagcagaggactaccaggttgcctcaggagaggtaaactggcccagggtggaaacacagcaggtcagaactcccatgctgatcagtagtgagatgttgtctgtgaatagccactgcaattctgcctgcacaacgcagggagaccccgttttcaatttatacacacacacatatacatatacatatatattttatacatacatatatacaaaataagtattggagaggatgtggagaaattactaccctcacacactgaaggtgggaatgtaaaaatggtgcagttgctgtggaaaattgtttcgtggttcccaacatagaattaccatatgaatcactaaatttcatatctaggtatataccccaaagaattgaaagtaggtgatgaaacaaatacttgtacaccactgtttgtagcaacactattgactacagccaaaaggtggaaagaacccaaatgtccctcaatcaatgaatggataaacaaattgtggcgcaagcctgtaatcccagcactttgggaggctgaggtgggcggatcacctgaggtaaggagttcgagaccagcctgactaacctggtgaaaccctgtctctactaaatacaaaaaaattagctgggtgtggtggcgcatggctgtaatgccagctacttgggaggctgaggcagaagaatcgttttaacccaggaggcgggggttgcagtgagctgagatcgtgccattgcactccagcctgggcatcaagagggaaaccccacctcaaaacaaaacaagacaaagcaaacaaaaaaaacaaatcgtagtagaaacataaaatattatgaagtact[148 bp omitted]cccgtctctactaaaaatacagaaaaattagccaggcgtggtggcacgcgcctgtagtcccagctactcgggaggctgagacaggagaatcgcttgaacccgggaggcggaggttgcagtgagctaagatcgtgccactgcactccagcctggcactttttttgagattccgtctcaaaaaaaaaaaaaagaagcaggatgctaagtgaaaggtgtcagaaacaaaaggttccataatgtataattccatttatatgaaatgtccacaataggtaattcaataggacagagattagtgttagacagtgactgcttagtgggtatggggtttttggggtgatgaaaatgtttcctaactttttatttgtactacatatatcctaaaatggtgaatttcacgttttgtgcattacacctcaatagagatgttttaaataataaaatacattaaaatgttttgcatagataaaacaataaaaaaaaacgtttttgttgagaaaatatttgcgagataaaatgttaatatcatgaatataagaacagtgcttgaaaagtgagggataaaaccaaaaactcaataagaaagtgggcaaaacatctggacaatttacaaaaaatgtaataatgacacctgaaaatatgcaagaatatgccatctttacaagagttataaattaaaactacatgccatttcttaccactggcaaaacttatttgaagagtgtatcatctcgcttgttccctttccagtaacactcctgtcctcactagaggggtttagacttcaggaattcctttctatacggtattttctcttaggcacccagggagagggaaggacgactctcagggtagaagtccacatttcccaacaggcgctcgggggtacgagattcgttccccgtgggaagagtggtcaagggcttcccagtagtcgtcaacacttccctttgagtgtaatgctgcaggagtacagtccagaccctcagtggaatcgcggtcggtttagctccggcagttgggtcccagggaattctgggaagtgtagtccagacgctcagtggagtcgcggtcagtttggctccggctggcgggtcccggggaattctgggaagtggagtccaaacattcggtggagtcgcggacacttccgctcggggactgaggttgctgcagtttttccgcgatagtttggggcagttccgcgcgttgcaggcccttctgaatttcctggacctacgcattggatcctcaaagaactggtgatcgaattaggggaaaaggggcctcgtcggagagtagaggtttggaggggcaagggccgctgtttgcgttctcgtccgtggcaccttcttgggcttgggtctgtcctcgcttcccgggggcattggtacttggttgggtcgcgtctcacctggtttcagggtttccggggctctgagctcgcccactccgccccctgcaccccacgcgcgtggccacttcttctcgatataacgttggggtgttaatctccttgggtttcccgttactgttctttaaaatggggactttagggccatcctaatggaatcgttttgggaactggaagaggtaacacaaatgagagccttaaagcagtccctgtcacttggtgactggtggtctcttgttaatttcccacgaaggaccgggtggggtcagagctccagctgcaggggcctcggcccttctccctgatccctgcaggacgctggatgatcccggaagccttctgacctctttttaggagagcgagggttgcgtccactttcatgaagggaaaggagcatttaacttttatgggggacggcgacgcggtcaaggtgtttcacagctttctcgttccccaacccgacctttccagaagagctgcagggagggacttcttggcttctgagggcaaagctctacgtgagtggtccttggctctttgaccgagatgctcaccccaaccgagagtgtataggttgtgtcctcgggcatgggggtcgataataattaagtcttaattagtaacttcattctaagggctttatacaaataaatttacgccacaccgtggctctgtggagaagtattgcttttttctattttaaaaacgaaagtgagacacagagcgcataggcacccgactagtgagaggtggagctggggttggaacctaagcagtctgggtcagagcctgatttgatcttctcttgggatacgttgtcactgaggcagaggaactagttggacttaggtggggaaagcaagacttaggggcttgaaattttctgagtttctaaaaatgttgtcaactattttgtttcaatcattacaaatattttgtattcttatagaaccatgtcattgtacagcattctatttttctttattaagaacaaaatgggcctggcgcggtggcttacgcctgtaatcccagcactttgggaggtccaggcgggcggatcacgaggtcaggagttcgagaccagcctggccaacatggtgaaaccgcatctctactaaaaaataattacaaaaattagctgggcgtggtggtgggcgcctgtaatcccatctactcgggagggtgaggcaggagaatcgtttgaatctgggaggcggaggttgcagtgagcggagatctgccattgcactccagtctgggcgacagtgcgagactccgtctcaaaaaaaaaaaaaaaagaacaaaatgtttttattacctacgaatccatgaagtaaaggtagcaactgttaagctcgtaatgtgtttctttctttttgtatatttataggtttatttatgaacatttacaaatttttataatttttttcttaatatttcccccttatgtgtttaactatggaaatttccaaatgctgacagactaaactagtgaattatcatgttatatcatactcattaatctcattattgttattatttttcctatgactgtttcctaaaattataaaactttttattttcatgtcatttgaaacctatagaaaagttgcaaaagtagcctaagaaattcttatttactctttacccacgtttgccaagtgtttacatttttcctgtttgttttgttgatgaccatcagctgaataccactagaaacatacctgtaaccagagacagctgattatagctttctgcagcaaggaagcccacgtaccaggggctgtcttggtaagtagaatttaggaagacctagtatatggtttcacataacatattagataatttcagattgtataccagataatgttatttattaaatattagatatctatccaaagactgctaatagtagtttattgtattatctattatacagtgctagataacatattacctaacttcatgttatgtactctgcagttctatatttaaatttgttctatttttcacttaaggttcttacaagtgtcccctacccatctgccaccaccacctgtgttcacagtctaattttatgcattgcctttaattgtcacatttccataatctttaatcttgaggattctacaccctttgtctttctatgcttgatatttttgaagagtataggcaagttattttggagaaaggcattcatttggagttgtgtctgatgtaattcatgtgcgggttcacattatgcattgttggtagggataccacagaagtggtgaattgcgggttcagattatgcattgttggtagggataccacagaagtgctgaaatgtccttttcattgcaacataacagggtccaagtgatgtcagtttgtctcttcattggtgatctcaaccttgtccacttggccgagacgctgtctttcagatttctccactataaagttacttaaaaaaaattgaaaagaataaagtttcttaggaatagataacattattagtgggcattcagctgtaaaatgaccttctccatttattctttgttcaactacaaatattctatcaatatggccttagaattgactcttaagttagataacgtgtacattaacaattattttttccaacctattgtatcatataacttacttatatcaggtgtacatccagtgatcattagacagtttgctgaatggagtaaccatcaccacaattcggtgatcatttcatgctcatattgatttcctcctgcctacttatggttagacttcattctcactcagatctgaagcaatcactaatcagttttctctatgcattttcctacccagacattttatagaaatggaatcctgcaatatgtggtcttttttaactggcttctttcatttagcaataatgtttcaaaggttcatgtatgttgtagcatgagtcagtacttcatttctttaaatttccaagtaagattccattgtatggatagaccatgatttgtctattcatttacccacaggagggcattttggttgtgccgttttgggtttttatgattaatgctgctgtgaacagtcatgtgccaattcacaatacacatccctgttggtgggtggcatccctggccaccttttcatgtctctttttctgcctttcctggcactttgcaggcacaattctgctttcccaggaactgcatcactcaggactctgcaagtttccagaagtaagagggaaaatgaccacgttcaaggtgggtaggacttgcttctattactcttaaaattccctctcagtacttaaattgtcacaagttttcctctgtcttgggaagactcaaggagaaaaacagacatttgaggatctcttgtgtaccatgtacttcctttgttacttttgagtggattttgcatttgtttttactacttgttttcttctatcatttattctatggagtagacaagattgtaggaatggataattatttcattatactacttctctgctcacacattagctatttttatcctgtgatactcttcctcatgtgcattcataactgtatttgtattggtgatgttaatctaatttaaattgcactctttgtatttaatattatataatgttcatttttaatggttgcaccatattcccatttaatcgatgttcctttttaattactttatacttccagacaccaggaactcagttttgaaaggctacttttgatgtgtgccacgttggctgttttgtagatagagtatccatatgtggcacatcatggcaggctgtaactgtggcttcacacaaggattgctggaagtttccacacaggaagagctagattctctttcccccatgcctgagtcatgccttctatgtcttttacttactggcctttctttactcctttatatactaaggaatttgaccaaagtaatatgtaagctaatttttttttttttgagatggagtttcactcttgttgcccaggctggagtgcaatggtgcgatctcggctcactgcagcctctgcctcccaggttcgagggattctcctgtctcagcctcctgagtggctggggttacaggcatgcgtcaccatgcctaattttgtatttttagtagagacagggtttctccatgttggtcaggctggtctcgaactcccgacctcaggtgatccacctgcctcggccttccaaagtgctggaattacaggcgtgagccaccgcgcccagcctaacctaaattttttgtgcatgatactagaaaatttgccagtcacttgtgttttgtttcttcatttactcctcagaacagctgaatgaggctgttcttatcttcctcttaaacacatgaaatatgagaaacctgctcaggttcagacaggagaccaagggtccagaatattagttattttagcctttttactcagttgaaagagagagaaaaagaaagagagaattctccattgagggaactgtgccctgtggtgtgggtgtctggagtgtcctgttgagtgatgatgtccacaggtggcatcgctcctccctggacctaccttgggaggggggcatcttctcttcctgtcgtagtacctcttccatggcccccagcacttcaggcacccaaggacggcaattaccacaattgttatagaacattttaaaattcattatgggaaaagatgccttacacaaaccagaaaatgtaacagtctaaggtgaaaatatttaccatttggatatctaaaacaagatacaatccaaaataagaatcttatgcccagaccagggaagaaaatccaaagaaatacaaataaaggacattaccaggaatgtatagaaggagaaaaacagatgtcaataaatatttgaaaagatggtggtattcatttataatcaaataagtgagaataataaaacaaaatcatggccaggcctgtgactcacacctataatcctggcactttaggaggcttaggaaggaggattgtttgaaaccaggagctcaagaccatcctgggaaacatagcaagactctatctctacaaaaagaaaaaaaagaaaaaaacaatttcttcctaatcagattaccaaagtaatgggaaaattgataacttgcttttggctatgttaagaaaaaccagaataatgtatccccttgaaagattttgaagttaggtaaaaaaaaaaattgagaaaacatgacataatcataatattaaatttctgacattttgttatttaaaacttactttaaataggagagtaagatctacctgaaatgttctttattggattggtaatcatggaaaagatataaaattaaatattcattatttagaataacaatagattagttccatggaacactatgcagacatgagataaaatcgacaataattgacaaaaataaaaatagctaatgtttattaagtattcagtcttgctacacacttttccccagtaacatacgtatattccactgtttaatttgaaaactatatcatgtgacgatcattatatagagaggaaagtaatgcattcaggccaacttgtccaaggtcacatgactgggaagggacagagccttatatatgcgctctgaggcacgctggctgcagatcatgacattcagtgttgcaattaatgtatgtagtttttgcctggagagtatagaggactcactgcataactactcaaacatgtcaccataagcttgtcagtttggcaaatgttgaagaaaaacaataacatccagggttcgagtttgagagaggaagacaatgggcattatcaaacaaagtcaggactgaattgctaaatgttgctgagggtgattgtcaagatttatcaaaacatatatatgtgtagcccaggatgccacatttagagtcctagagggttacttacaagaagactcaatgattgcacgaagtaaaaatacaggaagtctttttcatctttgtgtttctggtggaactcagggaaatcagtcattgtcaggatacagacagaatgagtaggaaatctacgagttgacctatgtctctcaagatccaaaacaacttcccacccctcccctctgtctgctcagtgccacccctctcccaggaatcattggtcatgagactgagattgcatatgtttgatgctataggaggcaatgaccttcaaggacgtggctgtggtcttcactgaggaagagctggggctgctggaccttgctcagaggaagctgtatcgagatgtgatgctggagaacttcaggaacctgctctcagtgggtgaggacaggcaccctctgtaacagaacgtcaggccccagaggtggctttgtatcctagggtacaaagtttcaagtcttaattagtaacttgaacctatggttcaagtttgagtgtgcagtaagaacctaaatttctggtaaactttaccttgatattacctagaatgtgttgggattaagcatgtaagtttgcctgtttgcaggacatcaagcattccacagggatactttccacttcctaagggaagaaaagatttggatgatgaagacagcaatccaaagggaagggaattcaggtaagaatcaagcaactgtgaatccctgtatgtctcttccacctgtttcacttctgtccatgctcaaatccattgccctggcctaaatggccaaacctctttcttggattattgacaaccatcttacacctggtggccctgccacccgccttcacatcctgacatctgttctcatagcagccaaagtgatccttaggaaatgtaagtcagattgccattcctcagctcaaaagcctgtttggcttatttttattaaagttacaacctctttaattgacttttagagaccctgtgatctgctcttcatcccctccctgccacctctctaactacatctcctgtcctctccttcttgctctgtctttaccagccactttattctccctgctgtttctctgtcctcccaagggcactgtgttgccttttgctggtacccagtgaccacagactgagcagactgagagacaaacatttattatttttgtgttctttagggatgaagtctgatacatctcactgggcaattatcaagttgtctgtagggcttcatgttttctggatgctcttggggagaagcctttactttagtttatcagtgtctaggcactgtccatactccttggctcttgcttcccttcctccatcttcaaaggcagcaacttgcatccccatagtcatgctccctctgccactcttcttatgccttcctctttcaccttttgggtcccttgtaattgttttgatcactcctggataatccaggatgatctttctgttctctggttaactgactagcaaccttaattgcatctacaacctctgttcccctgctgtataacaacgtgatcataagtcctggggactggatgtggacatcttttaggaaccattattctgtctctacagaagcttctgtctcagcccttacttgctcatctcagtcactgggatactctgtcacctcaaaaccttctggcatctccttcagttattcaagtttcttttcagttttaaagtcatgagagaagccatcctaaaccactctctttataattccattctattttgattcttcttgtgctctcttgtaccaagtctcacatacttctgtttatctgtcacttctacatgctggactataatgtctaaggaattttaactcttcgtggctgtattttcagtgcctagaatggtcctggtacatggcaggtttccaaatttttgttaacctgatatatgagctaatgaatggggtgacttcactgtctcctgaaattatggagagaactaataagtgaaacacaaactacggtgaaagagagatattgcagaacatgttttttgtcttccaatggccatgtatttaattacaatgttcttagattccgttatttgattgccttgtgtgtttacggtggacccacatcccatggaaacttctaagcattctatttattaccatactgagctatatgccttccatatgacttatcctggagcttttcataggaagcatattcatttctggaaagaaatcatttttgaatgaacattctgatgtctactagtgagacagctcttctacaaggggaaaaaattctccattttgtgatgtgtcagataataaccagcttcccagctagctttcctttgagagatttacccatctgcagcccatttgcctttccaaagtctgcatgcacgtcactgaccccaggtttcttcttctcctgggtggggaagaatgaggaagagagcaacacaattcatgcagctaaacattgcctatatttctggtcatctttgttcaaaaatatgtatatttctgcaccttcattgtatacagatttaattgttaaaaacataaaagaatacagattttacaacataatttttcctttattttttagagacctagtgctctattttcaactttataacttggaaggaatcaggaaactgccctctcaaaatactgacatcctgaaagagactctctcttctccccaaaaacctcttaagtaacagtgtgttaaatatatccatattccagcgtgtaccattgggtacatatttacctattactgtttttccaagattcaaccttggaagttaactttccatttgactgacttaatttaggacttggtaatatcctgaccaaagttgtcaacatttttatgattgtgagtcatagtaagaaacacatctttcaccataaccaggacaaacatttttcatgcatgtagatgtctatgggttacttcagtaggcatttcatgaaatgatacctttcttgcttgtcatgaagatgtgatcatttcttttctagttctttttttctaaatgctcattagaaggttttaaatttattttatagctcactttttgtctatattcttccatttggaaataagtataaaggagtatttatctatatcatatattttctgccctcttttttcttctttttttatttttttgagacagggtctcactctgtcacccatgctggagagcattggcatgatctcagctcacagcaacctctgcctcctgagttcacatgattctcatacctcggcctcccacgtagctgggattataggtgtgcaccaccacacctggctaatttttgtatttttagtagagacagggtttcaccatgttaatcaggctggtcaccaactcctgggctcaagcaatctgcccgccttggcctctcaaagtgctgagattacagacatgagccactgtgcctagcctctggtcttttttattttaatgagagtctaatatccccacatggaaccaacccagggcatgacccctcaggcattctttttatcccaagtgttctcaccacctttcattgtctcatcaggagcatcaccctttctttacccctgtcaggtccaacctttcagattcccatcaaaactggttgtctgtttcttacctatctcagttaaccaaattattgttcacatctacagaaaaataaaattaaagatacatgttatgccaaattcttgtgtaggaatattatgaatatgtagatataaacactcctaggcctttgatattattgtgaagagtttaactggctgcacagtttagagcaagagtttacagaagatcgctctcacttcacaccaactgcaagtgtggggatttcccaaaactaccttcacattcagtaattacctagaaagataagcagaactcactgaatgcttttatactaaaagttacggatatttacagggtagagatgcacattacatttcaccaagagaaaaataagaaacagttctgggaagtaccaaatgaggatcttgtattgtattctccccatagagtaggatgcgttaaattcccagaattaaggtgtgacgtagagggtacagcgaatcagggaagctcacctgagccctgtattttttttttttttgagacggagtctcgctctgtcacccaggctggagtgcagtggcgcaatctcagctcactgcaagctccaactcctgggttcttgccattctcctgcctcagcctcccgagtagctgggactacaggcgcccgccacc[187 bp omitted]gccattatttgttgattgattcccatgtggctagtcagtctcctgggccactgattccatgtaacctaaagcctcaccttaaatcacgttgctctttgtgacatagggggcaccgacccccaaaggcgtggccagctacaaccctaaatcatattgtttcactttccagtgacctagttttactctcaagcaaacaaagacactctcctcaggcataaactcctagacattacctctcagatcctgaggaaaacatctagacctcattttgagtaaggttaatatctttactttgtaaggatacacaatataaacacaaatgtaccaagtcttgattatattacttttgtttaaaattggttttgattcatattttattatatacacaatttattagcttcataatttaccatgcaagattttagactgattaggaaattcactaggaagagtagcaggtataatgtttgtatcatattaattttattattgtcttttatttttattaaaaattttatttcagtagtctttttttattaaagtatatactggtttttggttacatggttgaattgtctaatggtgaagtctgagattttagtgtacccatcacctgagtagtgtacattgtacccaacttgtagctttttatcccttaccctaccttccaccctccccattttgagtctccatagtccattatatcactctgtatgcctttgcatacccatagcttaactcccacttataagtgaaaacacggtatttggttttccattcctgagttacttcacttagaataatagcctccagctccatccaagttgctgcaaaagacattatttcatttttttatggctgaatagtattccctggtgaatatataccatattttctttatccactcattggttgatgggcacttaggttggttccatatctttgaaattgtgaattgtgctgtaataaatataggcatgcaggtgtccttttgatgtaaggacttcttttcctttgggtagatagtagtgggattgctggatcaaatggtagatccacttttagttctttagagaatctccatactgtatttcatagaggttgtactaatttacattcacaccagcagcagtgtataagcgtttcttctcaccacacccatgtcaacatctattgtttttcgtcttttatttctatcaagtattttacatatgatacttggtttagttcgaaattggcctcatccaaaccaaagattatggtgcacttgaaaaatacaaactgaatgttgtctatactcatgagagtttcctgccatggcctaagtgaaatcttgataacactgaacaaaggcttcacttgtcctcatcttttaattctgtattctgataggagacaagatccaaactgagatggagactgtttcagaagcaggaacacatcaagagtggtccttccagcaaatctgggaaaaaattgcaagtgatttaaccaggtctcaagacttgatgataaatagctctcagttctccaaagaaggtgatttcccctgccagactgaggcaggactatctgtaattcacacaagacagaaatcttcccagggcaatggatataaaccatccttcagtgatgtctcccactttgattttcatcaacaattacactcaggagagaaatctcatacgtgtgatgagtgtggaaagaacttttgttacatctcagcccttcgtattcatcagagagtccacatgggagagaaatgctataagtgtgacgtgtgtggtaaggaattcagtcagagttcacatctgcaaactcatcagagagtccacactggagagaaaccgttcaaatgtgtggaatgtgggaaaggcttcagtcgtagatcagcacttaatgttcatcataaattacacacaggagagaaaccttataattgtgaggaatgcgggaaggccttcattcacgattcccagcttcaagaacatcagagaatccatacgggggagaagccattcaaatgtgatatatgtggtaagagcttctgtggtagatcaagacttaataggcattccatggttcacacggcagagaaaccattccgatgtgatacgtgtgataagagctttcgtcagagatcagcacttaatagtcatcgcatgatccacacaggagagaaaccatacaaatgtgaggagtgtggaaaaggctttatttgtaggcgagatctttatacgcatcatatggtccacacgggagaaaagccatataattgtaaagagtgtgggaagagcttcagatgggcctcgtgtcttttgaaacatcagcgagtccacagtggagaaaaaccattcaaatgtgaagaatgtgggaaaggattttacacaaattcacaatgctattcccaccagagatcccatagtggagaaaaaccatacaaatgtgtggagtgtgggaagggctacaaaaggaggttggatcttgactttcaccagcgcgtccatacaggagagaaactgtataattgtaaggaatgtgggaagagctttagtcgggccccatgtcttttgaaacatgagagactccacagtggagaaaaaccattccaatgtgaagagtgtgggaagagatttactcaaaattcacatcttcattcccatcagagagttcacactggagaaaagccatacaaatgtgagaagtgtggaaagggctacaatagtaagtttaatcttgatatgcaccagaaggtccacacaggagagagaccatacaattgtaaggaatgtgggaagagttttggctgggcctcgtgtcttttgaaacatcagagactgcacagtggagaaaaaccattcaaatgtgaagagtgtgggaaaagatttactcagaattcacagcttcattctcatcaaagagtgcacactggagaaaagccatacaaatgtgatgagtgtgggaagggcttcagctggtcctcaactcgtctgacccatcagagacgccacagcagagaaacacctctcaaatgtgagcagcatgggaagaacattgtacagaattcattctctaaagtgcaagaaaaagttcacagtgtagaaaagccatacaaatgtgaggactgtgggaagggctacaacaggcgcttgaatcttgatatgcatcagagggtccacatgggagagaaaacatggaagtgtagggagtgtgatatgtgctttagtcaggcctcaagccttcgacttcatcagaatgttcatgttggagaaaaaccttagtgatgtgatggtgcaataaagtcttcactcagtcttcatgaatgcagtctcatctgaaagttcacaaaggagagacacattaaaatatgaggcacatagtaagcacttccctttgagtattttatctctgaatccatgctggtgataaatttcacccattcttggaagagggaaaacatttgtttaagataacatcagtgcttcagccatagctcagcatgccccagtagtctcaggaccaccataatggagaatccttgtaaatggtgcaataaagcttcattcagaagtttgataattacagctatcattcaggagacaggccttagaaagagtaagagttcatgaatttaccagactaatggtggacatgtccaaattgatgtccactagaatgtaaactacatgtgtctttgctgctaagtcgtcacagccttaacattgattagcactttgtatgtgttcagtacttgtttgttaaatcaatgaaaggataaaacatatgtatggatttggatacaattttgtgtatccaaaaagggaagcctgcaaaaaataattctgggaaacatgagttgaaatgcagagtaaactcagtactgcaatccatagcaatattttgcatattattattttttcttttaaatttttttcttgatcagatttatcatattcattgaacattattttattgcacttggctcctggcttccccccatcctgtgctctgaagtcagagtattatttgtggctctatgaaatgtccattgcttgtatacggtataaatttaattatcttttgtagtttttctcacagtatagactgaaaaggtttggttaattttgcaataacagaccactgcatatttcacaattaagtgttttcaacagtattaaggcaagatttacagtaacacttttaaagtgccagatgtacattgacagaaattttcttagtcaatcctagattgatcatgatttgtgatttctatgcaggccttggtatgattgccttttaattgctgtacaatttcttttttttttttaacttctctggtataaaatattctaaatttgaatgacagcttttgtcaaccttcttatccaatattcttccaccaacgctatgaaacaggaagagaaaatggagtttggtaatttcatcaaatatattcattattgggggcaggagtaacatttaaatcctcctctttattgctggcagtaaaaatatgtcttttggagagcagaacatgccagaatgtataaggtgcaactgtttgatatgaaaaccataggataggaaactatgcctatgacactaaaactccaaaaagtagaagaccacattgatgatgtcactgcattttaaaatggaaagaacaagtgttcaagaacaggaatttgtgtgaattgcatttattcctataataatatgaactcaatgagatgatgacatagacacaataacaaaaggagaaaaacaatgtggctttttttagccttcataacctaatcaaataaatatctttgtgtgttttatgttcttttgagtgtttacatactgtgtaaatgaatatttttactgatctttgctggcaatgagtgtttgcaggcatttttccattttatacttccatgcatttttaatttttttatgccacgatcttttaaacaaccagctcttgtgtgaattaagagtgcgaactcattcattaccatggtggggacaccaatgtttatgaaggatctgcttccatgaccaagcaccttccaatagtcccgacctccaacactggaggtcatacttcaacatgagatttggaggggatacatattcaaactattgtcagatgttaattcatcaggtatacaccatagtaatatcttaagtgtgttaagttaaagtgatatattttctaaggtatagaacaaatagggcttatcacccccctacaagcaaagaaaatgtcacaatgcttagtgtgccatttttgatattggatgcaacttattgtttcgattgtgctactctgacttttatgagtgacccaaaaactttgacttgtcccagacaagagaagtttgtgtaatatgtcccagcttccacgtaagcttctctgccactaaaaccctgtgaccccgggggtccaaaagtgtttgaaatgtccgtggcagatagtatgtttgaagcctatggttggccctaattggagaatcaaaattcagatgcttagtattttgaagcaaatttctgccatcctctgcatatacttactctcctctggagaagaagcttttcattttgctagggtgttttgttttgttttgtttttgtttttgttttttgagacgagtcttgctctgtggcccaagctagagtgcagtggtgcaatcttggctcactgcaacctctgcctcccggtttcaagcgattctcctgcctca[134 bp omitted]gcctcccaaagtgctgggattacaggtgtgagccaccacgcccggccactaggggtcttaaaacggacagaacacttgaccacagaccaccaaattaacatgtgacttatgctttccatcatgaatcgggtgttgacccctgcacctttttaagttacatgtgcagattagtattccatttggaagtggtatatatgagattgtgtttgtgcaggctctgaagccacaggtaagtgcacctaatattcatctccctactcttgctgtattcagaatgagtgaatataaagagaagtcatctgaaattattgtgtctcagcagcagaaagaagtggaatacacggttggacgcggtggctcacgcctgtgatcccagcattttgggaggccgaggcgggtgaatcacctgaggtcgggagtttgagaccagcctgaccagcatggagaaaccccctctctactaaaaatacaaaattagccgggcgtggtggcacatgcttgtaatcccagctacgctggaggctgaggcaggagaatcgcttgaacgcgggaggcgaaactccctctcaaaacaaaaaacaaacaaaaaacaaccaaaactgaaagctggtaatgaaacaaatacgtatacacgaacatttgtagcaacactgttcactacagccaaaaggtgaaaagaagccaaatgtgcgtcaatgtatgaatggagaaacaaattgtagtataaacataaaatattcatctatgaaaaggaatgaagtactgatacgtggtatgatgtgaataacattaaaaatattatgctaagcaaagggagttagaaacaaaatgttccattcatttttatgatttgtccaaaataggtaatagaaaagagagaaagattcatgtttccccaggaatgggattatggacaacagtagtgattgcttagtgggcatggggttttctttgggtgataaaaatgttttgtaattcaagaggtggtggtttcacaatgaagcagctactttgtctgaggtttaaacccggggttcgtcgttaagcgccagaaaaatttaggacacggacacacaaaaactcctcagtttaggagcggaggtttaataggaagaagagaaagagaaacgggttcctccatagaggaaggggtctccgagcggaaaagggtcggctggcagtgaatgtgctgagttttacagaccagtttgaggaggcagtgtctgatttacataggggtcatagattggttcgatcagttatgacgtttacatagtgcgtggggaaggctggtcgccccaccctaatcttcttatgcaaataggcttcccagttgattggcccatcttgccagcttcttactgtgcacgtggctgacaaagagaagggaagatggagccgccatctttaacatgattggcacaactgctggtatctatgtctgcggcagctggattttacaggctgctcttccttaggaagggaaataatttggggctgcttttcattaaaaagaaaagccttaccgagggctcccataccctatctgcctaagtgatggcttcttaactcgtatatattaacaacactgtattcgtactagatgccattgccattgaattatgtgccttaaaataattttgttttgtgaattacacctcaaaaatattttttaaataataaaacgaccacgttaaaaacgttttgcatagcgaaaaacaagtcaaaggaaaaaagctttttggttgagcaatatttgatacaatgttaatatgagtatgtaaataatacttaacggaggggaaaaaactaaacactcaatagaaatgtgggcaaactatttgaccaattcacaaagactataatagtggcaacggaaaatatgcacggatgttccactttatttacaaaagaacaaatacaaattaaaactacatttagaaaccatttcttaccattagattagcaaaacttaactcctcgaagactgtgtcttctcgcttgttccctttccaataacactcctgttatcattggaggcgtttagacttcagaaattcctgtctattcagtattttctgtcctggaccagggagagagaaggacgactctcaggataacagttcacattccccactaggcaggcgctcgtggctttgggattcgttcccagtgggcacctcggagtggcaacgcttccccctgaagaatgagattttgagcgtttttccttcagcattcggaggagtgtaatccaaatgctctgtggagtcgtacacactggctccagaaggaggatacaagcaattctgggaatggtagtccagacgctcagtggagtagcggtcagcttggctccggcaggcgaatcaggggatttctgggaaatgtagtccagacgctcagtggagtctcggtcaatttgactccggcaggtggatcccagggaattctgggaagtgtagtccagacgctcggggtcgtcgcggtcagtttgtctcaggaattctgggaagtggagtccagacactcagtggagtagcgggccacttccgctccgttactgtgaggttgctgcagttttgtccctggtagtttgggtcagttccgcgagacccttctgaatttcctggacctacgcattggatccttaacgaactggtgatcgaattaggggaaaagaaacctcgtcggagagcagaggtttggcggagcggggccgctgttttcgttctcgtcagtggagccttcttgggcttggggctctcctcgcgtccccggggtgtttgggacttggtcgggtcgcgtctcgcctggttttagggtctccggggctctgagctcgcccactcggcctccctgcaccccacgcgcgtggccacttcctcgcgataaaacgctgggatgttacttaatctccttgggtctcccgttacagttctttaagatggggagtttaggaccatcctaatagaatcgttttgggaactgaaagcggtaacacaaatgagagccttaaagcagcccctgtcacttggtgactggtggtctcttgttaatttcccacgaagcctgtcaggtccccgggtggggtgaaactccagctgcaggggcaccggcccttctccctgattcctgcaagacgctgggtgatcccggacgccttctgacctctcttttaggaaggcgagggttgcatccacttccaggaggggagaggagcatttaacttttatggggcacggcgaccacggtcagagtgtttcacagccttctccttacccagcccgacctttccaaaagagctgcagggagggacttcttggcttctgagggcaaagctctacgtgagtgatccttggcttttttctttgacagagatgctcaccccaaccgagagtgtataggatgtgtcttcgggcatgggtgttgctttcagttgtcatgtttttctagtctttaatcttgaaagatagcatagctttcatcgttttttcttggtattttatccttgttatttttgaagagtatagatgaagttattttggtcaaagatgttcatttggagtttttctgatgtatttcacgtttaacttcaaaatatgcattttttgctggaataccacagaagtggtaaatctctctctctctttttttttcttgagacggagtttcgctcttgtcgcccaggctgtagtgcatggcacgatctcagctcattgcaacatccacctcctgggttcaagctattctcctgcctcagcctcccaagtagctgggattacaggtgcctgccaccacatccggctaatttttgtatttttagtagagaagggatttcaccatgttggccaggctggtctcagactcctgacctcaggtgattcaaccgccttggcctcccaaagtgtgggattacaggcatgagccaccgtgcccagcctgaagtggtaaatttcttattgcaacataacaggggccatatgtcagtttgtcacttcattggtgatctcaactttgttcacttggctaaagtcatgtttgtcagatttccgcattgtaaaattattttgaatttttttttttaccccaggaacacagattcaagttgctctcaatatacactccctaattttttagttaaataaaattttgtaaggagaaatacatttattagtgcacattctactgtaaaggtgaactctcccttctccttcatttgcttattcattcattcaactataaatattctatcagtgtagatccagaatccagtcttattaagttaaatgacatgtggatgaacaattaccaatgctttgtccaactttattgaggtgtattctacatatcatagaaactacccatttcgtgtgtacactttaatgatttttaggaactttgtggagtggaataaacatcaccataattcagtttaaataattttcatcccccattaagcctccttgtgctcacttatagttaatcctctttgtcacctcaaatatgcagagaccacctatctactttctcgttatatacacttgcctactctggaatttcatagatataggatcatgcaatatgtgggccttcctatgtgactggcttctttcacttagcataatgtttccaaagttcatgcgtgttgtagcatgaatcagtacttcattccttttaatttccaaataagattccattgtatggataggccacaatttgtctatccatgtacgcataggagggagtttgttggtgtgcagttttgggttactatgaatgatgctgttgggaacattcatgtgttaatttacaatacacattcgtgttggtggatggcatccctggccacactttcatgtctctttttctgccttccctggtactttccaggcaggattctgctttcccttggactgtatcactcaggactctgaatattccctgaaataggaggaaaaatgaccacgttgaaggtgagtagagcttgcctctcttgctgttaaaatttcttttatggagacttgttctgtcgccaaggctggagtgcagtggcctgattttggctcattgcaacctccacctccggagttcaagtgattctcctgcttc[131 bp omitted]ccttagcctcccaaagtgctggaattgcagatgtgagccaccgtgcccggccgtatttcttctcactactcatattctcacaggttcttctcagtcttgggaagacttagggagtacaacagagatatagcatgggacaaacagaatctagctcttcccgtgtgaacacctccaataatccttgtgtgaagcagcagttaagcagttatagcctgttgtgttgtgccaacacgagagccagcgtccacaggtggcactgctcctcccaggcaccattttggggtgatcttctttcttcctgacatgacacctactcagatgcacccagtgctccaggcacccaaggacagtgataaccatagtcatgatagaaaatctttactttcagtatggtaaagggtacctcacacaatgttaccagaaaatataacagcctagagcaaaaatattcactacttgtatatttgaaacagataaaatccaaaataagaatcttatgtacagaatagaaaaagaaaatccaaaggaatgtgaataaaagacattaacaggcaagtttaaaaggagaaattgagatggccaataaatatttgaaaaggtgatggtattatttataatcaaataagtgagactgttaaattcttcctaatatgattacaaaaatcatgggaaaattgataacctgctcttggttatggtaagacaaatcagtgtacacgtatcctcttgaaagattagggtttggtaaaaaattgagacctgatattatatgatcacaattttaaatatgcctatttattgacattttaattttcatttaaaattattttaaataaacagtagtaaaatctacccaaaatgtttttttttacaggattggtattaatgagcatatataaaattaaagattatttagagtagataaaaatagattatcaattctttggaatactatgcagacatgaaatgagataaaatagatggcaacaatgacaataataataaaaaaaattttaaaaagctagtgtttattaggtatttagtctgcactgatcaactttcccaatgctgcatgtatttccttgtttaatcattgaaaaaactataatatgaaaattattagagagggagtaaataggtgaacttgtccaaggtcatgtgaccaggaaggcacagagccttgggatgtgcttttaggcacactgtctgcagatcatagatcaatgctgcaatcaatgtatgtagtttatgccttgagagtacacaggatgtactgtatagctgtcccacacaggttaccacaagctttgttagtttggtggcagatattaaagaaaaatgataacattcagggttcaagtatgagagagaacaatgggaattatcaggcaagactgggactgaattgttaaatgttactggggcagttggcaagattcactgaaacctatatacgtgcagcccaggatgctgcatttagagtcctacagggttacttacaaggagactcagtaagtgcacaaagtaaacctacaggaggtcttttccatcactgcacttctggtggagctcaggaaaatccatcattatcaggata[133 bp omitted]gaaaccccatctctattaaaaatacaaaaattagccaggcatggtggcaggcacctgtaatcccagctacttgggaggctgaggcgggaggatcacttgaacctgggaatcggaggttgcagtgagccaagatcatgccactgcactccagcccgggcaacagagcaagactgtctcaaaataaataaataaataaaataaaataataaaaaaggaagtctgtgtgttgacctatgtctctcaagatccaaaacagcttctcattcctcccctctgtctgctcagtgccacccctctctcagtagtcattggtcatgagactgaggttgcatatgttcgatgctgtaggaggcagtgaccttcaaggacgtggctgtggtcttcactgaggaagagctgaggctgctggaccttgcccagaggaaactgtaccgagaagtgatgctggagaacttcaggaacctgctctcagtgggtgaggacaggcaccctttgtaagggaacatcaggaccaggagtggctttgtatcctagagtgttcaagtttgagtatgcattgggaacctaagtttccagtaaattttacttagatttttttctaggatatattggcactaagcacatgacttttcacgttcacagggcatcaatcactccacagagatactttccacttcctaaaggaagaaaagttttggatgatggagacagcaacccaaagagaagggaatttaggtaagaagcaagcaactctgtgtccttgtgcgtgactctcccatcggtttcacttctgtccattgcccagctctgttgtcctggtctaaatggccagacctctttcctgaattattacagctgactttcggctggtttccctgctcccacttttcccaccctgacatctgttttcctcatggcagccaatgtattccttaggaaagtcagactgccattcctcggctcaaaagcctttctggcttcttttttttttttttgagatggagtctcgctgtgtcgcccaggctggagtgcagtggtgcaatctcggctcactgcaagctccgcttcccgggttcacgccattctcctgcctc[224 bp omitted]tttagagaccatgtgatctgcttttcatcccccaccacctctctgactacatctcctgtcctctcccttttgccttgtccttccagccacgttgtcctccctaccgtttctctgacctgccaaggacactgtattgcctgttgtagtaaccaatgaccacacatttagtcgactaaacaacaaaaatttatcatctttctgttctttaggcctgaagtctgacacgtctcaccggacaattatcaagctgtctgtaggtgtttgtttctttctggatgctcttgaggagaagcctttattttggtttaccagtctctaggcattccttggctcttgtttcccttcctccatcttcaaaggcagctactttgcatttctgacccttcttccatagtcatgctcactctgccactcttcttatgcctctctctcctgcctttcaggttccttgtaattgtgttggttacccctggatgattcacaatgacctctctttcttgttagctgattagtgaccttaattgcatctgcaatcccagtcccccttgctgtgtaatataacatgttcataggtcttgggtactggatgtggacatcttttatgaatcattgttctgtctactactgaagcttctgcctcagagcccttacttgcttttctgtctgatcagaatactctttcacctcaaaactttctggcttctcctttaagcatattcaagtctctgttcagttttagagaggccatttccaaccaccctatttaaaatactattctaggccaggcgcggtagctcacgcctgtaatcccactactttcggagaccaaggtgggtggatcactgagatcaggagtttgagaccagcctggccaacatggtgaaatcccatctctactaaaaatacaaaatttgccaggcgtggtagtgtgtgcctgtagtctcagttactcgggaggctgaggcaggagaatcacttgaacccaggaagcggaggttgcagtgagccgagatggcgccaccgcactccagccttggtgacaaagtaagactctgtctcaaaaaaacaaacaaaacactgttctatttttttcttcttgtgctgtcttgcactgtgtcttatatatttctgtttacctgtcacttttacccccaggaatgtgatgtctaagaggatgaattttagctgttttgctcatggctgtctattcacaggctagaaggtattgttctggtacatggcaggtatctaattatttgttatcctgataaataaattaatggatgaggggaacttcagtgtctccaggaatcatggagatagatagctaataagtgatacacaaactagagtgaatgagagctattgcagaacatgtttctgtcttttgatggctgcctatctaattagaactttcttaggattccttgttgggatactatttttaggtatgtgcagttcacctacatcccatggaaacttctaagtgttctttttatggccacactgagtattatgccttctctctgacttgtcttggagctttatgtttttatttttattttttaaaaattttccacaagttattggggtataggtgatatttggttacataagttctttagcgacttgtgagaatttggtgcgctcatcacccgagcagtatatgctgcaccatatttgtagtcttttgtctctcgccctcctcccactctttcccgcaagtccccaaagtccatttctctcttttttttttttaagcagagtctcgctctgttgcccaggctggagtgcagtggtgccatctcggctcactgcaggctccgcctcccaggttcacgccattctcctgcctcagcctctcaagtagctgggactacaggcgcccgccacg[175 bp omitted]tcagtgagaatatatgatgtttggttttccattcctgagttacttcacttagaataatagtctccagtctcatccaggttgctgcaaatgctattaattcattcctttttatggctgagtagtattccattgtatataataccacagttttctttattcactcgttgattgatgggcatttgtgttggttccacgattttgcaattttgaattgtgctgctgtaaacatgcatgtgcaagtatctttttcgtgtaatgacttcttttcctctggatagatacccagtagtgggattgctggatcaaatggtagttctacttttagttctttaaggaatttccacattgttttccatagtggctgtactagtttacattcccaccagcagtgcagaagtgttccctgaacaacacatccatgccaacatctactgtttttttgatttttgattatggtcattcttgcaggagtaaggtggtatcgcattgtggttttgatttgcatttccctgatcattagtgattttgagctttttaaaatatgtttgttggccatctatatcttcttttgaaaattgtctattcatgttcttagcccactttttgatggggttgtttggtttttttcttactgatttgtttgagtttgttgtagattctggatattagtcctttgtcagatgtacagattgtaaagatattctcccactctgtgggttgtctgtttattctggtgactgttccttttgctgtgcaaaagctctttagtttaattaggtcccaattatttatctttgtttttattgcatttgtttttgggttcttgatcatgaaatccttgcctaagccaatgtctagaaggatttttccaatgttaccttctagaatttttatagtttcaggtcttagatttgagtccttaatctatcttgaattgatttttgtataaggtgagggatgaagatccagtttcattctcctacatgtggctagccaattatcccagcatcatttgttgaaaagggtgtcctttcccccactttatgtttttgtttgctttgtcgaagatcaattggctgtaaggatttgggtttatttctgggttctctattctgttcctttggtctatgtgcctatttttataccagtaccatgctgttttggtgactatggtcttatagtatagtttgaaatcagttagtgtgatgcctccagatttgttctttttgctttagtcttgctttggctctgcgagctcttttttggttccgtatgaattttagcattttttttctaattctatgaagaatgatggtgatgttttgatagggattgcatttaatttgtagattgcttttagcagtatggtcattttcacaatattgattgcacccatccatgagcatgagatgtgtttccatttgtttgtgtcatgtatgatttctttcagcagcattctgtagttttccttgtagaggtcttttgactccttggttaggtgtattcctgagtatttgattttttttgcaactattataataggggttgggttcttgatttgattctctgcttggttgctggtggtgtgtagaagagctactgatttgtgtacattaatcttgtatccagaaactttgctgaattcttttatcagttccaggagctttctggaggagtctttaggattttcaatgtagatgatcatatcattagcgaacagtgacagtttgacttcctctttaccgatttgggtgccccttatttctttctcttgtctgattgctctggctaggacttccagtactatgttgaggagtggtgagagcagatgttcttgtcttgttccagttctcagagggaatgctttcaacttttccctattcagtgttatgtttgctgtgggtttgtcatagatggcttttattacattgaggtatgtcccttgtatgccgattttgtgagttttaatcataaagcgttgctggattttgtcagatgctttttctacatctattgagatgatcaagtgattttcatttttaattctgtttatgtggtgtatcacatttattgacttgggtatgttaaaccatccctgcatccctggcatgaaacccatttgatcatgatggattatctttttgatatgttgttggattaagttacctagtattttgttaaggattttagcatcaatgttcatcaaggatatcggtctgtagttttcttttttgattatgttctttcctggttttggtattagggtgatgctggtttcctaggatgaattaggaagggttccttctttctctatcttgtgaaatagcgtcaaaagaattggtatcaattcttctttgagtgtctggtggaattctgctgggaatccatctggtcctggactttttttgtttgtaatttttaaattaccatttcaatctcatggcttgttattggtctgttcaggatatctaatttttcctgatttaagccaggagggttgcatttttccaggaatttatccacctcttccaggttttctagtttatgtgtgtaaaggtgttcacagtagcctagaatgatcttttgtattgcagtggtgtcagttgtaatatctcctgtttcatttcttagtgaggttatttggattttctcgcttattttcttgggtaatcttgctaatggcctatcaattttatttatcttttcaaagaaccagctttttgtttcatttatcttttgtattttttgttttgttttgttttgttttgttttgtttcaatttcatttatttctgctctgatcttggttctttcctttcttctgctgggtttgggtttggtttgttcttgtttctctagttccttgaggtgtgatcttagaatgtaagtttgtgctctttcagtctttttgatgtaggcatttagggctatgaactttcctcttagcaccatcttagctgtatcccagaggttttcatgggttgtgtcattattgtctttcagtttgaataattttttaatttctatcttgatttcatttttgacccaatggtcattcaggagcagattatttaatttccatgtatttgcatggttttgaaggttcctcttggagttgatttccagttttattccactgtggtctgagagagtgcttgatataatttcagttttcttaaattaattgaggctcgttttatggcctatcatatggtctctcttggagaaagttccatatgctgttgaataggatgtgtattctgtggttattggatgaaatgttctgtatatatctgttaagtccatttgttgcaagacatagtttaaattctttgtttctttgttgactttctttcttgatgacctgtctgatgctgtcagtggggtattgaagtcccccactattattgtgttgctgtctaccacatttcttaggtctattagtaattgttttataaatttgggagttccagtgttaggtgcatatatgtttaggattatgatattttcctgttggacaaggccttttacattatataatgtccctctttgtctcttttaactgctgttgctttaaagtttgttttgtctgatatcagaatagctacccctgctcatttttggtgtccatttgcataaaatgccttttccacccttttactttaagtttatatgactccttacatgttaggtgagtcacctgaaggcagcagatggttggttggtgagctcatatccattctgcagttctgtatcttttaagtggagcatttaggccatttacattcaatgttagtattgagatgtgaggtgccgttgcattcatcttgctatttgttgcctgtgtactttggtttttgtatttttttgtttttgctttttaatatgtgtttttgttgtataggtcctgtgtgatttatgctttaaagaggttctgttttgatgtgtttccaggatttgtttcaagatttagagctccttttagcagttcttgtagtggtggcttggtagtggcaaattctgtcagcgtttgtctgaaaaagactgtatcttccattcatatatgatgcttagttttggtggatacaaaattcttggctgataattgttttgtttaaggaggctgaagatagggccccaatctcttctagcttgtagggtttctgttgaggaatctgctgttaatctgataggttttcctttataggttacctggtgcttctgtctcacagctcttaagattctttccttcgtcttaactttggataacctgatgacaatgtgcctaggcaatgatctttttgcaattaatttccaaagtgttctttgtgcttcttgtatttggttgtctaggtgtctagcaaggctgggcaagttttcctcgattatttccccaaatatgttttccaagcttttagaattctcttcttcctcaggaacactgattattcttaggtttggtcctttaacataatcccatacttctttgaggctttgtttatattttcttattcttttttctttgtctttgttggattgggttaattcgaagaacttgtcttcaagctctgaatttctttcttctacttgttcaattctattgctgagactttccagagcattttgcatttctataagtgtgtccagtgtttcctgaattttttatttttttttatttaagctatctatttccttgaatatttctcccttcacttattgtatcattttttggatttccttgtgctgggcttcacctttctctggtgcctccctgattagcttaataactaacctcctgaattccttttcaggtaaatcagggatttcttcttggtttggatccattgctggtgaactagtgtgatattttggtggatgttaaagtgccttgttttgtcatattaccagagttggttttctggttccttctcatttgggtaggctctgtcagaggtaaggtctagggctgaaggctgttgttcagattcttttgtcccacagggtgttcccttgatgtagtactctcccccttttcctatggatgtggcctcctgtgagccaaactgccgtgattgttgtctctattctgggtttagctacccagcaagtctacccagctctgggctggtactgggggctgtctgcacagagtcctgtgatatgaactgtctgtgggtctctcaaccatagatatcagcgcctgttccagtggaggtggtgggggtgtgcaatggactccgtgaggtttcttagctttggtggtttaatgctttatttttgtgctggttggtctccctctaggaggtggcactttccagagagcatcagctgtggtagtatggagaggagccagaggtggatgaggccctagaactcccaagattatatgccctttgtcttcagctaccagggtgggtagggaaggaccatcagggagggggagggctaggtgtgtctgagctcagactctccttgggtgggtcttgctgtggctgctgtaggggatgtgggtgaggttcccaggttactggagttgtgtacctaggaggattatggctgcctctgctgagtcatgcaaattgtctgggaagtaggggaaagctggcagtcataggcctcacccagctcccatgcaaaccaaagggccggtctcactcccaccatgcccccactaacagccctgagtctgtttccaggcagtgggcaagctgggcttgagaccttgccccaggctaccacctctcagctgcaaaagaaaagggcttgggtcttcccctgcctgtgagtctgcacactggattcacaccctcccccaagttctggccaggaggcttcttgcctggttcaaactgttataaagttcagctggatacttctttctccttgtggagttccccaccccctgctcctctggctgccttcctgatggatccctgtgatgccaggcaagaatggcctgcttagggacccaacgaggtcccaaggcctttctgttgctttgtctacccctgtatcttactcagctctctaaattgactcagctccaggtaaggtcggaaacttctcccacaaacagaccttcagtttctccagtgagggtgtgtgttcagtagaggaggctttttctcacttccacagttggggcactcacagtatttggggtgtctccagggtcctgcaggagcagtccacttccttcagagggtctgtgggtcctcttgggattgctagtttgtttttgcagttgatctggaggtaaaattcgcaatgggagactctgtatgccgcactgtccgtctgagttggagctgcaatctagtcctgccttccgtccgccatgatgatcttgtcttggagctttttgtagggagaatattcatccgtggaaagaaaccttttattttatttttctttctttattttattttattttattttttgagacggagtctgcctctgtcacacagactggagtgcagtggtgccatgtcggctcactgtagcctccgtgtcccgggttcaagtgattctcctgcctcagcctcccaagtagctggtatatgccaccatgcccagctaatttttttgtattttttagtagagacagagtttcaccatgttggccaagctggtctcaaatacctgacttcaggtgatctgcccacctcggcctcccaaagtgctgggattgcagggaatgagccaccactcctagccaaaaaaaaccttttcaaaggaagattctgatgtctccttctgaaacagctctcctatacaaggggaaaaaactttcaattctctgatgtctcagaaaataaccagctttccagctacctttccttcgagagatttacccatctgcagcctgtttgcctcttccaatgtacatcaccaatgtacatgtacatcaccaacccccggtttctctttccttctcctagagaaagaagaatgaggataagggtgacacaagtcacacatctgaatgttgcctgtatttctagtcatctttgtttgatagcgtggtatatatttctgcatctttattttttacaaatttgttaaacatgttaaagaatacagatttcgtacagtcttccttttctttgtatagagacatggtgctgtattttgaactggtgaactttatatcctggaaggaatcaggaaactgccctctcaaaatgttaacatcctgaaagagactcctccttcttcccaaaaatctcttatttataagggatgatgttttaattatatccatgtactaatgtgcaccagtaggtacacacttacttactaatgtttcctaagattcagccattgaaaattaactttccatttgattgatttacttaattcagaatgtggtaatatcctgaccaagattttcaatgttttatgaccatgagccatagtaagaaatacatctttcatcatcaccaggatgaaaatattttgtgcatgtagatgtgtatgagtacctttagtaggcatttcatataatggcacctttcctgtttgtcacgatgctatgataatttctattctggttctttttcctaaatgctttttagaaggtttcagatttattttacagctcactaagagtctgtagtgtttattttgaaaatgggtataaaggtctgtttctttacatcatattttttctgctatctgttttcaatgagacagtccaataacttcacatggaaccaatcagggcatgaccccttaggcgttcttttcatcccaggtgatcttaccaactttcattgtctcatcaggatcatccccctttgtgtatttctgtcaggtccagcctttcagattcccatcaaaactgaaggtttctgatccttttctatttcaggtaaccaagttattgttcatatcagtacagacaaatgagattatacatgttctgcaaaaattcttgtacaggaatactctgaaaatgtagacataaatactcctaggtatttgatatttagtattgtgaagagcttaaccaattgcaaagtttaaagtgacagctcacagaagactgctgtcactgcataccaatgacaaattcagtggtttccccaaattattttcatgttccatattcttaaaattatgggtttttataggggaaagatgcatattacaattaggagaaaaatcaagtaagacagagtccagggaagtatcaaatgagaactttttattgtactctccccatgaaatcaggatgcattacatccccaagattaaggtgtgacattagacgggaggagagcctatcagggaagctttcctgagccctggtattcagagtaatcgttgtctgttaattacatagccattattggttgatttctttcccgtatgagtagtctcagtctcctggttgactgattccacatgacctaaagcctcaccataaatcacattgttggtctttctcacatagtgagcaccacattctcctcataggtgtggccacccataatcctaaatcgtagaattacaccgtccagagtgacttactagacctactacctccaggcaaacaaagacactctcctagggcatgacattttaaggactgagagattgcctctcagatgctgaggacatcacccaggcctctttgtgacttaggataatttctttacttcataaggatatacaatacaaactaaaatatacaaagttttgacgatgttatggcttctccttaaagttcacatttgattcatatttcactgtttacataatttattagttacataatttaccatgcaaggttttatttctaccaagtatttcacatatgacacgtggtgtggttctgaattggtctcatgcaaaccagagtccatagtgtacctggaaaacacattggctgggcacagtggctcaagcctgtaatcccagcactttgggaggccaaaatgggagtatcacttgtggccaggagttcaagaccagccttggcaacatagcaagaccttgtctctacaaaaagtgtaaaaattagctagttatggtggtatgtgcctgtagtcctagctactcaggaggcagaggtgggaggatcacttgagcccaggaggtcaaggctgcagcgagccatgattgtgtccctgcactccagcctgggtgacagagggagacactctctttaaaaaaggaaaatacagggctggg[138 bp omitted]gtggcgggcgcctatagtcccagctactgaggaggctgaggcgggagaatggtgtgaacaacccaggaggtggagcttgcagtgagcggagatcacgccactgcactccagcctgggggacagagcgagactccatctcaaaaaaaaaaaaaaaaaaaaaaaaggaaaatacaatctgaacattccctatatttattaaaatttcaggctatgtcctaagtatgaaatcttgataacactgaataaaagctttacttgcccacatctcttaattctgtgtcattataggaggcaagatccaaatggagatggagactgtttcagaatcaggaacacatgaaggcttgttcagtcatcaaacctgggaacaaatttcaagtgacttaaccaggtttcaagactccatggtaaacagctttcagttctccaaacaagatgatatgccctgccaggttgatgcaggactatctataattcacgtaagacagaaaccttctgagggtaggacgtgtaaaaagtcctttagtgatgtctccgtccttgatcttcatcaacaactacagtcaagagagaagtctcatacatgtgatgaatgtggaaagagtttctgttatagctcagctcttcgtattcatcagagagttcacatgggggagaaactctataattgtgatgtgtgtggtaaggaattcaatcagagctcacatctgcaaattcatcagagaatccacactggagagaaaccattcaaatgtgagcagtgtgggaaaggctttagtcgtagatcaggactttatgttcatcgtaaattacacacaggagtgaaacctcatatttgtgagaaatgtgggaaggccttcattcatgattcccagcttcaggaacatcaaagaatccatactggggagaagccattcaaatgtgatatatgttgtaagagcttccgtagtagagcaaatcttaataggcattccatggttcacatgcgagagaaaccattcagatgtgatacatgtggtaagagctttggtctgaaatcagcacttaatagtcatcgcatggtccacacaggagagaaacggtacaaatgtgaggaatgtggaaaacgcttcatttataggcaagatctttataagcatcagatagaccacacaggggagaagccatataattgtaaagaatgtggaaagagcttcagatgggcctcaggtctttcaagacatgtgcgagtccacagtggagagacaacattcaaatgtgaagaatgtgggaagggattttatacaaattcacaacgttattctcaccagagagcgcacagtggagaaaagccatatagatgtgaggagtgtgggaagggctacaaaaggaggttggatcttgactttcatcagagggtccacagaggagagaaaccctataattgtaaggaatgtgggaagagctttggctgggcctcgtgtcttttgaatcatcagagaatccacagtggagaaaaaccatttaaatgtgaagaatgtgggaaaagatttactcagaattcacaactttatacccatcgtagagtccacagtggagaaaaaccattcaaatgtgaagagtgtgggaaaagatttactcagaattcacaactttattctcatcgcagagtccacactggagtaaagccatacaaatgtgaagagtgtgggaagggcttcaacagtaagtttaatcttgacatgcaccagagggtccacaccggagagagaccttataattgtaaagaatgtgggaagagctttagccgggcctcaagtattttgaatcataagagactccatggtgatgaaaagccattcaaatgtgaagagtgtgggaagagatttactgagaattcacagcttcattcccatcagagggttcacactggggaaaagccatacaaatgtgagaagtgtggaaagagcttcagatgggcctcaactcatctaacccatcagagactccacagtagagaaaaactacttcaatgtgaggactgtgggaagagcattgtgcacagttcatgccttaaagaccaacaaagagaccaaagtggagagaaaacatctaaatgtgaggactgtgggaagcgctacaagaggcgcttgaatcttgatacgcttttgtcattatttttaaatgacacataactgttgtactcatttatggggtacagtgtgatagttaatgcaagtatacaatgtgtaatgatcaaatcagtgtaattaacatacctatcacctcaaacatttatcatttatttatgttgggaacccttaaaattcactgtcctagctatttgaaaataatacgttgttaattactgtcaccctgtagtggtgtaaaacactagaacttattcctcctacctgcctgtatttctgtattcattaaccaacctttggctaccaccctgcctcctcacctctaagaactactattctactctctacttctatgaagttaactttttgagcttccacatatgtgtgagaacatgtggtatgtatctttctgtgcctggcatatatcacttaatataatgccctgtaagtctcattcactttgctgtgagtgatagaattttgttgtttttcatggctaaatagtactctgatgtgtatatttgccccattttctttattcattcatccagtggacacttaggttgattacataccttggcctatttcttggctatcgtgaatggtgctgcaataaacatgggggggtggagataacactttaacatactgatttccttttctttggatatgtaccaagtatcatataatagtatgacatgactcaaaattaaggaataagattgtggaaattggttttcaaaaaaaaattctctagtttgaatatagagaaaaattggtgagtgtcttcagctgtcctcatacataatgcatgtgagctcgctttaagcataagtgaaggagtggaaaaatcctggagatagaaatcaaggggtatacatgtggatgtaaaaaatcaacaaagattcttttaagaaaaggtgtgtatgggtagggaacaatagcatgacagcagtgcggcctctaacagtctggaaccagttaggacaaagagcaggattgagcgccattccattcatagacaccgtggtgatattttgagtacattaggttaaaaggctttcttcagcaaaatctatctctagagatagatttgatttttataatcaaatctactagagatagatttgatttttataatcaaatctaccagagatagatttgatttttataatcaaatctactagagatagatttgatttttataatcaaatctactagagatagatttgatttttatacttaatgttctagactgtatcttttcaggatgctaggtactttatgaagatccatgctgtctcaatttgcatagtgggttggaggtccctaagacaatctctccagattctatgatttgctaagaggactcagaatatagttgtactcatgactatattatagtgacaggatacaaataatcagcaaagggaaaaggttcttgtataatatctggagggaatcagatgtaaatttgtaaagatcctttgtgcatggagtaacaggtctcaattcctccagtattgaattgtgactgtacttgtgaaatgtctacaatggaaattaattatcaacccgtaccaaaggttcttattggaactaatcatgtaggtaccatccctctggtacatatcaagattctagactccaagaaggggagcaagtgttcagaataacttgaaccatgcctaccagttatggaatggtggcaaccctctcaaactccgtgtttcctaacaccagctaaaggccagtcttataagcagtcctttctaagatttgcagtctcaggcctgttatattaactttttgtgcacatagtactagaaaactgttggctcagtcttctttttgttttgtgtgttttggtttttaactgtcaccgataccagaatagctcatctccaaggtaactgtaacagaacactcagcagattaaacagaaaatacttgcttattataattattaaaagtttggtagggtctatgtctgctctctggtgtgtcctggatcatcaacttggttacaacatggtgttaacatgtgggactgattgtgtttcttgttaatatttctgtttctcccaaccacgctgaatattaaatacctagttctatatctagtaccctgagcttatgtggggctaatattctttgccatttttcaccacagatttgatttcctttttcttttgtggacactggtgagttccctaatataactttgacttggttatattttcacaatcggtggggattattacagattatcatccttcctctgcatttgaaaaaggagggaggcttcaagtcaggttagttgaccttcctttgttggtcttattatccataacataataaataaattgatgaggatgggcatggtggctcacgcttgtaattccagcatttagggaggctgaggcggcgttttagaccagcctagccaatgtggtgaaacctcatctctactaaaaatacaaaaaatatgccaggtgtggtggtgtgcgcctgcaatcctagctactcaggaggctgaggcaggagaatcgcttgagcctaggaggcggaagtttgcagtgagccagaatcgtgccactgtactcctgcctgggtgatacagtgagtctccatctcaaaaaaataagtttatgagaagtctattaaattgttacataatctatataggtagaaggtttctatttcaagtgaaccaaagtgtaacttgaatcgtctaatgcagactcacagcccaaaaataaattccaagacatgtccactttacaaatccacaattcctttgatggggtgggagggcagttctggataaggatggaccctgctagattgcaaaaaatttacagcactaattttttccccagagatctccataaggacctatggtcatgaacttctgtgactgtgtactcaaaaagagaaataatcacacattttggcagtgactgaattcttgttttcaagtaggataaatccaaagagactcacactgagacacattataatcaaaaagacaaggaacatcttgaaagcagcagcatgaaagtgacttgtcatgtacaagagatcctcaataatatcatcaatggctctggccaggtacagtggctcatgcctataatcgcagcactttgggaggctgaagcaggtggatcacttgaggtcaggagtttgagaccagcctagccaacacggtgaaaccctgtgtgtactaaaactacaaaaattagccaggcgtggtggtgtacacctatagtgccagctactcaggaggctgagacaggagaatcacttgaacctggaaggcagagattgcagtgagccgagatcatgccactgcactccagcctgggtgacagagggagactgtctcaaaaaagaaaaaaaaaaaaaaaaaaagatcatcagtggatttctcagcaaacctccaaggccagatgatgtattaaagtgctggaaaaaaacctggtatattgaggattctatattcagcaaaactatacttccaaaatgagagatcaattaataacttttcagaaaaacaaaagctgagagaattgccagtagacaagttattcaagaattgaaaaggttgggaggctgaggcaggcagatcatttgaggccaggagtttgagaccagcatggccaacatggtgaaaccctgtctttactaaaaatataaaaattagccgggcgtggtcgtgggcgcctgtaatcccagctacacaggaggctgaggcaggagaattgcttgaacctgggaggtggaggttgcactgagccgagattgtgccactgcactccagcctgggcaacacagtgagactccatctcaaaaaaaaaaattgataaagggaatcaatccttcaagttgaaatgaaaggattttagacaataacttgaaatcatatgaaaatataaagatctatactaaaggcaattgcatgaagcaatacaaacaacattatgatagtaattttagtttgtaatcccagtttttattttccatacaacgtaaaagacaaatgcataaaaatgactaccaatctatgtaaataagtacacgatatgtaaagatgtactatgagatcagtaacagtgcgggaaggaaagagctgtgaaggagtagggtttttatatctgattgaagttaagttggtatcaatttaaaagactgttataactttaggatgttacatatacttttggtgactataaagaaaatatcaatgaaacatgcacaaaagaaaataagaagtgattcaaggcaaggcagggtggctcatgcccgtaatcccagcactttgggaggccaaggcgggtagatcatgaggtcaagagattgagaccatcctggccaacatggtgaaatcccatctctgctaaaaatacaaaaaaaattagttggggatggtggcacgtgcctgtagtcccagctactcgggaggttgaggcaggagaattgcttgaacccgggaggtggagatcttgtagtaagctgagattgtgccactgcactccagtctgggcgacatagtgagacaacatctcaaaaaaaaaaaaaagtgattcaaaattaatcactacaaaaaaagaactcaacacaaaggacaattgtaatgaaggaaatgagaggcaaaaacacaataggacatataaaaaacaaatttaaaatggtagtccttacctatgtataattagtttaagtgaaattaatgaaactccccaataaaaagatgtagtttgtcaaaatgattgaaagacaatatgtaattatatgctctgcacattagaattaatgacatgcataggtgaaaggcaaatgatggaaaaagatatcccatgtaaaaaaaataacagcacaggtagctatactaacagataaattagattttaagtcaaaaactgttaaacgagacattaaatattgctaaaaggttcatttcactaagatgaaacagttataaacatatgtgcaccaaatatcagagttccaaaatataaaatgtaaatactgacagaattgaagggagaaatatacagctctccaataatagtaagagactccctacctttctttcaaatgcataggacacccagacaaaagataaataaggaaacagataatttgaagaacattatacaccaattcaacctgagagacattgacataactctccgccccccaacagaatacacattttctcaactgcacatgaaacattcttcaagacagaccatatattaggccacaaaacaagtcttgataaatgtaaaagtttgacaccataaaaatatattttccaactacagtctagatcataataactagacatcaatagcagtataaaaagtgaaaaaagcctgaggcgagaggatcacttaagtctagaagtttgagaccagcctgagcaacatggtgagactctgtctctaccaaaaaaacaaaaaacaaaaaggctgggccgaggtgggcagatcacttgaggtcaggagttcaagaccagcctggccaacatggtgaaaccccggctctactaaaaatataaaattattcgggcgtggtggtgcatgcctataatcccagctacttgggaggctaaggcaggagaatctcttgaacctgggaggcagaggttgcagtgagccgagatcacgtcattgcactccagcctgggcaacaagagggaaactccgtctcaaaaaaaaaaaagtatatatttgctagttttgtcagctgagagggtcaagaataaaaaacactaaggtagcagcgatcatacctagcactcagttctttgtttctaactacattttccacaaataggaaccagaagtcctaggagaaatatctgatctcatggctagggtagggaaaatacccaatgaacttgaaaaatacctaatgaacttggaacacacagtatcagaaagtaaaccagtgcacaaagagctcatatcatgatgaacaggaggagccagaaggcaagaggggactgcttgaagaggattttactggcaaaatctgagacaaccagagaatcaaaatacataataacagtagtagatgtgaactcattaatataacaagaattcacaaatccacactggtataaacaaataaataatatagatggaaagctttttcttagagcataatgccaaaaaatcaacatagaatgagttggagtatctcagtttttcaccagatagtagtaactttttaggggaaaaataattttagagtgcagaattctggagagaaaccccttaatcaactgttcaagtttagcagcaccagtaatggataaaaactagtatctggtatatcctgagatcatgcactaaggacagaaattgatcataatccagaaagacataatcttgaatgttggaatcgctgaagatcaaaatgttaaaaatataaccctggaaaaaataattttaaattttttagaagatattgactgatttacatttctttcttttcttcctttttttttttgtttttttttctgagacagagtctcgctctgtcactcagctggagtgcatttcccttccttcctccctcccttccactttttttttttttttctgagacagtgtctcgttctgtcacccagattggagtgcagtggcgtgatctcggcctcccaggttcaagtgattcttgtacctcagcctcctgagtagctgggattacaggcatgtatcaccatgccacgcccagctgattttttgtatttttagtggagacagtgtttcactatgttggccaggctggtctcaaactcctggcctcaagtaatccgctggccttggcatcccaaagtactgggtttacaagcgtgagccactgcgcctggccgagatggagcatctcaataaattttgtcatttggaagggccgactagagcaacaatacagctgtaactagtatagaaatagcagtcagtcaattttcaaagagggggatgtgtggcattgtgtggttagcatagtaaccttgtttttatgtaaacacaattgtgaaaaggtatttttttagtttataaaatgaatctagaatgtgagacttcattttttaaaaaacaaaaatatagattgataagtgtattagtccattcccccattgctataaagaaatacgtgagtctgggtaatttataaagaggtttcattggctcacacagagtcctgcagcctgtaaaggaaacatggcagcatcagctcagcttctggggaggcctcaggaaacttacaaccatgctgcaaggcgactagggagccagcacttcacatggccagagtaggaggaaaagagcgaggagtgagatgctacacaattttaaacaagcagatctcatgagaactctatcaggagaacagcactagagggatggtgctaaaccattagaaacctccccggtgatccaatcgcctcccaccaggccccaactccaacactggggattacatttcaacatgagatttgggtggggacacagatctaaaccatatcaataggccaatgtatgtttatggggagaaaaaaatctggttatctttttttttttttttttttccgtgacagagtcttgctctgtcgcccaggctggagtgcagtggcatgatctcggctcactgcaacctctgcctctcaggttcaagcgattctcctacctcagtctcccgagtagctggaattacaggcacgcaccaccatgcccggctaatttttgtattcttagtagatatgggttttcaccatgtt[139 bp omitted]ttgctttattctattatttatttgtatcaaccaatgtaagccagattccaaattgctaactataatgacgatattttaaccaaaaaatataaaggaagaaaataaaatatgttccttcacgtataggatcctccttaatgctactgcattaaataaatcataggcattgggtgtctgacatcaatgccaagcgcttcaccagttatacttgctttgaagtattgggcaatttaagagcttctctgaaatttggtgtttttacctcttcagtagacataataccatgaaaagtgtaaacgaaagaagatagcttttccatgaggacagggcttccccactggccctctcaaatgatgattgtttttcctgccaaaccagtggtaccacagcgtctggagtaggggctggcaccttctttgttcttcattgcctctcccaaaccattgtacttgctcactcttccaacttttagttttggcctcatattatcagtttatagtaatcaatcatcaatcatctactgacccctaaaaagtcattccccatttagtccttgaagattgtatctcctcgcttgttctctttccaataatcctccgtagtcctgggaggcgtttagacttcaggaattgctgtctattcaatattttcgctcaaggactcaggcagagggaaggacgactctcagggtcacagtccacattccctaccaagcgctcagcgatataggattcgttccccatgggcagtgcgggaatcgtaggcaaggagcaccgcggagtcccatcgcttttccctgaagggtgagattctgaacgtttttccctcagcattctgagtgtaatccaaacgctcagtggagtcgtggtccatttgacccacgcagggggatccggggaattctgggaaatgtagtcccgccaatcagtggagtcgcgggcacttccgctccagggaagagggggcgattgtcacggcacattccacggtagtttcttccagttccgcgactcgcgggcccctcctaatgtcagggacttaagattggggctcgctgggacctggtggtccggttatgggaaaagaagcctcgtgggagagcagaggtttggtggggcgagggcggcggcttttgttgtgtcagcggagccttcttgggctggggctcccctcgtgtcccgcggcgggaggcggggggcattgggacttggttgggtcgcgtctcgcctggtttgagggtttccggggctctgagctcgcccactccgcctccctgcactccaggcgcgcagtcacttttttacagtgcaaggttggcgtgttaatctccctgggcctctccttgctgttctttaaaatggggacgttaggaccatctttgtagaatcgttttggtaactggaataggttacacaacacaaacagtccctgtcacttggtgagtggtggtttcttgttactttcccacgaaacctgttaggtcccccggtggggtcagagctccagcagcaggggcctcagcccttatctctgatccctgcaggacgctggacgatcccggacgccttctgacctctttttaggcaggcgagggttgcgtccacttccacgaagggaggggagcatttaacttttctcagggacagcgacccagtcaggatgtttcacagctttctccttccccagcctgaaaaaggactgcgcggactgacttcttggctactgaaagcaaagctccacgtgagtgtgacttgtcatttttcttttacagagactgtatctttgtagcatgtgtaatagggcatgggcatttataataattaagccttaattgctaacttcaattctaggggatttatacaattagatacgtttaagccgcaacgtgactctgtggagaggtactggtcatccaagtagtaagaggtgaaacttgggttggaacctaggcattcagggtcagagcccgagttgatcatctcttggatatattctcattgaggcagaggaactagctgtactcaggtggggaaagtaagttagaacttgattaaaggaccttaagagcaaggctaattgccttggagttttctcagtttttaaaaactgtcaactattttgtttcatttattacaaatatttcacattctaatagaaccgtatcactgtgaagcattcagaaattacagaaatacgaagatacaaaaattgtaattacctatgaaatcaggatgtaaagatagtaatggttaaatttctaatgcattttgttttagtggttccatgtttatattacttataaatgttttacaaaatttttattatacatttctcaatgtttttctatttatctgcttatccatggaaatttccagataaagagataataaactagtgacctgccatattctatcatgctcattcttattcttctcattattatttctcctatgactatttcctgattttttaaaaaaactttaacacagtaattatataattttaagtctatagaaaagttgcaaaaatagtataagagggcagggcatggtgggtcatgcctgagtcctgagttatggaactgaggcactcagggtcacagcccgagtaatcccagcactttgggaggccaaggcctgtggatcacttgaggccagg[224 bp omitted]gaggcaagagaatggtgttaacccgggaggcggagcttgcagtgagccgagattgcgccattgcaccccagcctgggcaacagcgcaagactctgtctcagaaaaagaaaaaaaaaaaaaaaagaaaacccgtctctactaaagatacaaaaattagccacatgtggtagtgcgcgcctgtaatcccagctactctggtggctgaggcatgagaatcgcttgaacccaggaggagaaggttgcagtgagccaagattgcaccactgctctccagcctgggcaacaagagcaaaactctgtctcaaataaattaaaataaaataaaattaatttttatgagtagatatacttgttagtgggcaacatactgtaaagaccagcatcccctgttcccctgtttgcttattcattcattcaaaagtaaatattctatcaatatggactcagaacgcagtcttgttaaattaaatgacatgtagattaataatttttttccaactttattgaggtgtattttatgtatcagaattcacccatttcaagtgtacaattcagtaatctttaggaactttgctgagtgtagtaatcatcatcatcatttagtttagatcattttcatcccccaattggactcctcttgcccatttacagttaatccccattcttatcctaaatccccatcaacaagtaacctactttctttataaacatttgtctgttctgaacgtttcatatacatgaaatcatacaatctgtggtttggtgtgcctggcttctttcactcagcatagtgtttccaaggttcatgcatgttgtagcatgagtcagtacttcattcctcttaatttccaaataagattccattgtatggatatgccaggatttgtctatccatttttccataggagggcattttggttgtgtgcagtttgggattattatgaataatgccaccgtgaccattcgtgtgctaattcacagtacacatctgtgttggtggggacatccctggccacgctttcatgtctctttttgtgtcttccatagtgttccaggcacgattctgccttctctcaaatggcataactcaggactctgcaaattcccagaaacaggaggaaaaatgaccacattcaaggtgaataaggcttgccactcttgctgttaaaattccatctcactattctcatgtttcctgaggaagactcaagaacaacgggcatttgagaacctgtttatgctaagtgcatccttctgccttttgagttgactttgtttttagatgttgtttattttattatttcagttgaccttctgtatctgtgggtttcacatctaggggttttgcgtctttgaattttgcatttgtggattcaaccaaccacagattgaaacctgagtctatgtaaagctgaccatacatattttccttttgcggttgattgagtctgtggatgtggaacccatggatgtggagggctgactgtagtacaaacactattttagataagggacttgagcatccacaaattatggtatcctcaggggtccttgaaccaattccccaagcgtattgagcgacaactgtatttattttatggagtagaaaaattggtgtgaatgaacagttctcctactttacttctctgcttacgtattagctgtttttattttcttatagtcttttcctaatgtgcattcataactatattggtattcatgatatatatctcatttttgttattttttccttaagtactaaataatgttcattttttgaggttatgccatatacccatttaattaatgtgcctttttatttttgactacttcccattcatggacatttaggtgatttaagaattttattgttttacataacactgcaatgacaattttcctacataaccgtttcctcaaaaatcaattctgaaaactttctgctgatttttttgtcaccacaacctctgccttctgggttcaagcaattctcctgcctcagcctcccgagaagctgggattacaggcatgtgccaccatgcccagctaattttgtatttttagtagagatgggactcctccatgttagtcaggctagtctcgaactcctaacctcagatgatccacctgccttggcctcccaaagtgccgggattacaggcatgagccacagtgactggctgtagatagaatactctaacatggcacagcacaacaggctataatgctgcttcacacaaataatattgttggagttttcatataggaagagctagattctgtgtgctttgtgcctcgatcatactttgtatgtattttatttactagtgtcttattgcctttataaagtaaccagtttgaccaaagtagtaggtaataaccttcatttaaaatgtccagtgacacggaagatttgccagtcacttgtgttctgttactgtatttattcagaacagcagaatgaggaggtttgtggtctcttcttcctcttaaacaggtgaaatatgagaaaccttctcagattggcatagaaagtcaggggtcagaaacattagccattccatttaagtgaaagtgagagacaaaaggaaacaaatatttctcaatgaatgacccgtggtgtgggtgtctggagtgccctgttgggtgataacgtccacaggtagtgggggacctcttgtgttcctaatgtggtggcacctcagatgcactaagatgctcagcactccaggtgcacaaggacagtgattagcacagtggttatataaagtctttaaattactctacggatatccccctcagatagtggtttctcgggtatatacccagtaatgagatggctgggtcaaatggtatttctagttctagatccctgaggaatcgccacactgtcttccacagtggttaaactagtttacagccatcattctactgtcaattctactaataagtggttcattcaacctctgcaccctcattacaacacaagaacatctctgaggagtaccctgaagcatggggatcagggggtgaggtttttggtaagtgttttagtgggtgtgacaaaagataccttacagagtattaagagaaaaacaagttggggcaaaaatatttaccacacaggtgccaaaaaagatgaaattcataataaacattggtattcatttataatcaagtaagtaagaataatagaattgttcttcctaattagattatcaaaaccattggaaaatttataacctgctt[137 bp omitted]acctatgcctcccgggttcaagtgattcttctgcctcagcctcctgagtagctgggactacaggcacgcaccaccatgcctggctaatttttgtatttttagtagagatggggtt[133 bp omitted]aggcaggaaaaaaggaagaaaatctgccattatgtggtcataatttttaatgtgctttttttctgatgttttattttttatttgcagttatttagtttaatttatttttttgggacggggtctcactctgtaacccagactagagtacagtggtgtgatcatcgctcaccacaaccttgattacctgggctcaagcaattctctcgcctcagcctcctgagtacctgggaccacaggcacacgccaccacatgcagctaattttttgtactttttgtagagacagggtctcaccatgttgcccaggctggtcttgaactcctgggctcaagcaatcctccatccttggcctcccaaagtgctgggattacaggtgtgagcgactgtgcatggcctgcaatcattttaaatacacacgaaggtaagatctgacagtcgggtgactcatgcctgtaatcccagaactttgggaggccaaggcaggcggatcacctgagatcaggagttcgtgaccagcctgaccaacatggtgaaatcccatctttactaaaaatacaaaattagctgagcatggtggcgcatgcctataatcccagctactcgggaggctgaggcaggagaataatttgaacccaggaggcagaggttgcagtgagccaagattgtgccattgcactccagcctgggcaacaagagtgaagctctgtctcaaaaaaaagaaaaaaaaaaggaaagaaagtaagatctacatgaaatgatgttctttgctggattggttataatgaaaacaatattgaaaattaaatattcattaattagaacaggtagatgcagatttcagttccctcgaataatatacagtcatgaaatgaggtgaaatagatgatgatggtaataataatagataatagctaatgtttcttaggtacttagtctgcgccatacactattccaaatgctatatgtagtttctttttcaacgtttgaaagaactctgtcatgtaagaactatcataccaagatgaaactaggtgaacttatccaagatcacacaactttgaagggtacccttgtgtgcactgaggcatgatggctccagatcatgacactaaatgctgcaggtaatgctggtgctgtgtgccctgggtgtacagaaggaaaactacatagcagttttagatatgttaccaaaagcttgttagtttggcagactttaatgaaaagggatagcatccagcgttcctatgtgagagaggaggaaggtgggtgttatcatgtatgttggttctgacttgctaaatgtttctggggcaattggtaatatttaccgaaaggtgaaacccgtgtggctcaggatgcgtcatttagagttctagatggttacttacaaatagactcagtgaagccacaaaggaattgaaggctattgttactgatgtacttttactgacactaaggaaaatcaaagtgtggcattggtaagatggaaggagaagggctgagaaatctacacattaagtctctgaaaatctggaccagctccccctacatactctccactttctcagtgctgtttcttttcaagagtttgttaaaaaggctgaagtaaggtgtgtttgatgttataggagggactgaccttcaaggatgtggctgtggtcttcactgaggaggagctggggctgctggaccctgtccagaggaatctgtaccaagatgtgatgctggagaacttcaggaacctgctgtcagtgggtgaggacatgagctttctaacactcaatgtcagtctcttggagtgattttgtgtcttcaggggttcaacactttggaggtcttgaattagtcgcctacatttgtagacctgactttcctatcagtagtttttagtgaaataaaatgagatagaaatatcagagttcactaaaattaatggaatacatagcaaataaaactggtaaattgcatgagtggtgtgagaacttgtgggaggagatttaatgaaaataaacgggggccaggcacagtggctcacgcctgcaatcccagcaccttgggaggctgaggcaggtggatcacctgaggtcgggagttcgagaccagcctggccaacatgatgaaactctatctctaccaaaaaataaaaaatacaaaaattaaccaggtgtggtggtgcatgcctcttatcccacctacttgggaggctgaggcatgagaatcgcttgaatccaggaggcagaggttgtagtgagcctagatcacgccactgcactccagcctgggtgacagagtgagactgtctcaaaaaaaaaagacattggttagaaatgtaattttagtaatgcaccaagatgtaacagtttttctgttgtttgagataacacctggagttttttgttttatttttaagaagattaatgagtgcagacagaaatgtgaggttagagtgaaggtttaataagcaaaagaagaaagctttttgccagcagagagggggacccaaatggaattccccctatgaggcaggggtttggggtttttatggactgggaaggggaaggaatgtgcttagtttgtgggctattttggagaaagtgtgacttagcttggcccggaaccttggcccaggaccaatcaggttgaagtaaagatatatagagaccggacttacagtttgaaaaaaagaaagtagagtgcccactggaacccactggagcccactgtacctatgcccacaaaaggagaagaaaccttttcctgggagcccgctgactatacagaggacaaaggcattcttatgccaggccttgctcctttatctgagcgagctggaggtatgtacaagcttttatccaaatgggctggaggtttttctatctgtgcagccgtgggcatgtctccaggcacaacaccctgtggtagttcccttattggtgcctgcagcttaaattttttttccaggctgctttttatgttatataaaaataagacactaacccatgggtcaggggctctccaaagacccttcccttgctgtctacctaaggcaagcgaactaactcctttcagaaataggtttttatagcacatatttatgtctatgtgtctggatcttgaaatactgatatttcttcattaggttcttctaaaagtgtttgaaaacactacttttgattgattgatcagtatacagtagtaattcaaattgccagtaagttcagttgtacctttagtgtgtttgttttaaatatgtgactttgcgtgttctagggcatcaccccttcaaacatgatgtattccttttagaaaaggaaaaaaagcttgatataatgaagacagcaactcaaagaaaagggaaatcaggtaagaaccaagcagctaagagtccttgtacgtgattgtccatctgttgtacttctctcccctgctcttgctgccatcgggtccaaattgccaaacctctgtcctggatgattgcaacagccttcgtactgggcgcactgcatccaccctcaatagtataaagtatgttctcctacaggcgttctccatatcatagctaaagtgatcctttggaaatgtaagtcagattgccattcctctacttaagaccttgtacagggctgggcacagtggctcatgcctgtaatccagcactttgggggccaaagcaggaggatcaggagtttgagaccagcctggctaacatggcaaaacctcgtctctactaaaaatacaaaaattagccaggcgtggtggccagcgcctgtagtcccagctactcaggaagcttagacaggagaatcgcttgaacccaagaggcaggttgcagtgagccaagatcgcaccgctacactccagcctgggcaacagagcgacactccatcttaaaaaaaaaaaaaatactctgaatggcttcttatttttcttaaagttgaagtctcttaaaggagcttatagagtcctgcgtggtctgctgttcatcctcctctgcgtctctgactacatctcctgtattctacctcttgctccatcttttccagccacatcatcctccctgctatttcccagacctggtaaggacattgctcgctctgtcgcccaggctggagtatagtggtgcaatctcagctcactgccacctccgcctcccaggttcaagcgattcttctgcctcagcctcccaagtagctgggattacaggtgcctgtaaccacgtccggcggatttttgtattttttatagagacagggtttcaccatgttggccaggctggtctcctgacctcaagtgacccgcctgcctcagcctcccaaagtgctgggattacaggcatgagccactgtgcccgacctggacactgcatttcttactgctgctgtaacatattaccccaaactgagtggattaaatgataaaaatgtattgtctttcagttctttgtttgaagtccaacatgggtctcactacgctgaaatcaagctgtcagcccgtccctgtttcttcccggaggctctagggaaggagaatctgtatcgttcccttatcagtgtgtaggggctgccaaatttcatagcttgtggccctcttcacagccagcaacagtgcttctctgatcattcttctatagttgcatttcccttttattctctcttcatcctttttccactttataaggaccctctaattgcactgggcccacttggataatgtagaattgccttctatttttagttcagctgatttgcaaccttaattccctctgcaaccttaattaccctttgtcataacctgacatattcttaggatgagaattagaacgtggattctttgggggttgattattctgccaactacagatacttctgcctcaaagcccttatttgcccttgtctttgcctggaaaaactcacctacaatcctctcggcccctctcttacttcatcctggtctctgctcagttttaatttcacagtggtggccttttctgacatccttactggaaatgccatcctttactctctgccctaccttctcttgtgtctcatagactttggtttacttgcttgtcccctctctctccccactggaatataatctccaagagtggaggaatttttttgtttgtttgtttattactctatcatcagtgcctaaatagtcctgttacatggcagatatctgttaatataaatatctgttggcataatgaaggcattaatggatggatgtgacctcactctaggggtcttgcagctaggacaggtcatacacaaaccaaaatgaatgaagggggttgcagaacgttatttgttttctgatggctgcacatccagtttcttctgccttaggtgcccttcacgtgaatgtttgtgtgtgcacttgaacctcataccatgaaaacttacaagcatcgtggttgtgaccacactttgagtaacaagccttcccagtggctttcctggaggcttccatcatatggaacacattcatttctgggaaggaataatttttgaatgaagattctgatgtctacttctgagatagctccccccacaagaagataactatttcctaaggtgtcagatagtaactaggttgcaaactgctttcctttcagcacactgcccatctgaacctcatttgcttcttccaaagtgcccatccgtatcactgcccccaggttttgcctcccctgtgccagaggtggaagatttaagatttgagtggcaaaagtgacacagctgaatgttgcctgactctctggttcaaaaatatgctgtgcttttattttctacaaatgtagtagccattaagcatatattaaagaatatagatgtcatacaatttttcctttatttttataaagacctggcttttatgttcaactagttgacattataacctgggaaaaatgaagaaacttcttgctcaaaattgtcacatcatcatagagacttgtcctcctcaaaaaaactacaatttttaagggtcagtttgttaaatctaatcatgtattcatcatatatatatatatatatatatatatgcgccaagagttacatactctcctatgaatattttcccaaggtgtcacggttggaaattgtctttccatttgaagcagtttgtttaattaaggaccaggtaacttctagaaccaaagtttttgagctcttttgagcatgagccatagcaagaaacgcatttttcattgaaattagaacaatgaaacaaacatttcatgtctgtatagattgatattatagctttagtaagcatttcagaaggacccctttcctgctggtggtagtactctgatagtttctatcctggttcttttattctgaatgcttattacaagcttttaaatttatttcacagctcactaaagggctacagtttttaatttgaaaaactgttgtgaaaggcccaacttacctacactgagagcttcagaaggaaccagtgtatagggcttcctgctttctttttatcccaagtgattcttgccaccttcaaattttcttattagcctcaccctggatatacctgtctcttgtacaacttttcagcttctctgcaaaattacaattttctgttcttttcctatttcaaataacatttggaaaagatgcttttctcctaggacttggcttaaattctcacacaaaaaaagtcaagttggggttcatttattcatttgacatgcatttattgagcattcactgtgacaggcacagttctggacaatggttataaagtaggaaagtgtaaaacgagtattatgtcaaaattagaaaatgcttccctcattgatgctgcattgtggtgggaaggacatacattaaacaaccagtaatttagtgtgtccagtggttaaaagtgctgtgaagaacatagacaaattcaagttgctagaggtgaattgggtgaagacaggattcattatttttcaatgagtaataaagcagccctcattggtgagctgacattgagcagagacccacaagacgtgaggaaccatccatctcgctatctgggaagagttcctccctgaatataactcctgctgtgggggtggctttcaaagtttacactgtgacatctttttcttctccctgtctccatctcaattgtgaaagattggagtctacttctttttcacttttttttttttctggaggtctaaattactgtcagcttttagaataatacatgttatcagttcaactttctttccctttagtcctcatgtaggaaacttgctgacagaagctaaagtttcaccatctgcttatctgctaatattttagtcagtatgtggttaggtacttgctcccagcctgcaagtcatgttaaccattccagtcacctggatattgaagtaactttccaataaaatgactcagggcagagttatatagacaccatttaacaaatgtctactgatacaaaggaggaggtagatttttttctctttttcttttttttttttttttttttttgagacaaagtctcactgtgtccctcaggctgaagtgcagtgataaaatcatggttcactgcagcttctaactcctgagttcaagcgatcctccatctcagcctcccaaatagtgttaactacgggtgcgtgccaccacatctggccaatttttttaaaagtttttttgtagggccagagtcttgctatgttgcccaggctggtcttgaactcctgggctcaagtgatcctccggcttcagcctcccaacatgcttggattacagatgtgagccactgcaccctgccaagaggcagcttttaaatgactattcctgcaggaggggagtaagtttttcctctgtaaaaatttccttagaggtacgtctttctgctaaacttttgtggaagagttcatttaaaaaataatttccaaatatttatatctctttatacaagattaaacattttggaatattattaaggataaacctttcagaagggtttaaacattttaaatctaagttatattagaagtggtcaagagtttataatagttgtcagctcatttaatgtctgtcaacacagaaaaataagattaagtgtatatgttatgcagaatattcaagaatatggttgatccttgaacaacttgggggttagggacaccaactcccctcacagtaaaaaatccaagtataacttttgactcccctctaaaactttactcatggcctactttgactgaaagacctactgataacatagtcaattaacacatattttgtatgttataatgtattgtatactatattcttacaataaaggaagaattctttattcttacaataaagagaagagaaaatgttattaagaaaattataaggaggaagaggaggggttggtcttgctgtctcagggatggcagagatggaagaaaatccatgtataagtgaacacatgcaggtcaaacctgtgttgttcaacggtcaactgtattttgaacatgtaaatataaacatttcaggttatttaataatttgaatatgtaacatgaacctaaactgcaaaatatttgattattttcttactttcccttgaagttcttgttgatttatattatctacatttttttttaacttttaatatttttaatagaggtacattcttgctttgttgcccagactggtctcaaacccctggcctcaaactatccttctgccccagcctcccagaatgctgggatatacaggcatgaccatgcctggcctatgctttttatatttagataatttactatttattattctacactgactttaaaattcgatggaaatggcagtacaatttgtatcatgttaatttttaaaattaactctgacttctaacttgtgtctcacataggagacttggtatggtctaatgcctggtagatagcagccaattggaccacctcttgatttatctaggcatggaaatcagagatcatgatacacagtggaaaagaccattacacaaactggaccttctctggatttgttaaaatcgcatgctctcgcctaagtatgacatcttgaaaacttttaacagagcctccacatctctgaattctctgtccttacagcagacaagatccaaagtgaggtggagactgttccagaagcaggacgacatgaagagctttactgggggcaaatctggaaacagattgcaagtgatttaatcaagtatgaagactctatgataagtatttctcggttccccagacaaggtgatttgtcctgccaggttagggcaggactatatacaactcacacaggacagaaattttaccaatgtgatgagtacaaaaaatccttcactgatgtcttcaactttgatcttcatcaacagttacactcaggagagaagtctcatacatgtgatgagtgtggaaaaagcttctgttacatctcagcccttcatattcatcaaagagtccacatgggagagaaatgctataagtgtgacgtgtgtggtaaggaatttagtcagagctcacatcttcaaactcatcagagagtccacactgtagagaaaccattcaaatgtgtggaatgtgggaaaggcttcagtcgtagatcaacacttactgtacattgcaaattacactcaggagagaaaccttacaattgtgaggaatgtggaagggccttcatacatgcttcccatcttcaggaacatcagagaattcatactggggagaaaccattcaaatgtgatacatgtggtaagaacttccgtcgtagatcagcacttaataatcattgcatggtccacacaggagagaaaccatacaaatgtgaggactgtggtaagtgtttcacttgtagctcaaaccttcgtatccatcaaagggtccacacaggagagaaaccttacaagtgtgaagaatgtggtaagtgctttattcagccttcacaatttcaggcccatcggagaatccacactggagagaaaccatacgtatgtaaagtgtgtggtaagggtttcatttacagttcaagttttcaggcccatcagggagtccacactggagagaagccatacaaatgcaatgagtgtgggaagagcttcagaatgaaaattcattatcaagtgcatctggtagtccacacaggggaaaaaccctataaatgtgaagtatgtggtaaagccttccgtcagagttcatatcttaaaatccatctgaaagcacatagtgtacagaaaccttttaagtgtgaagagtgtgggcagggcttcaatcagagctcacgacttcagattcaccagctgatccataccggtgagaaaccatacaaatgtgaagagtgcggaaagggatttagtcgtagagcagatcttaaaattcattgtaggatccacacaggggagaaaccatataattgtgaggagtgtgggaaggtcttcagtcaggcctcgcatcttctaacccatcagagagttcacagtggggaaaaaccatttaaatgtgaagagtgtgggaagagcttcagtcggagtgcacaccttcaagcccatcaaaaagtccacactggagaaaagccatacaaatgtggggagtgtggaaagggcttcaagtggagcttgaaccttgacatgcatcagagggtgcacacaggagaaaaaccctatacatgtggggagtgtgggaagcacttcagtcaggcctcaagtctccaacttcatcagagtgtccacacaggagagaaaccatacaaatgtgatgtatgtggtaaagtcttcagtcggtcttcacaattacagtatcataggcgagttcacactggggaaaaaccttacaaatgtgagatatgtggtaagaggttcagctggcgatcaaatcttgtaagtcatcacaaaattcatgctgctggtacattttatgaaaatgatgagaatagtaagaacatcagagagttgtcagagggaggaagttctacaaggtgattaaaaaaaaaaaaacagaactcatgtacaacctgaatgcttgtaattagatttcataggagggaaaaattttctttatcaacctctttgaatttatttgatttgtaacgctccacatttccacctagacttttttttgttttttattttttgttttgaaacagaatctcgctctgttgcccatgctggatgcagtggtgctatctcagctcactgtaacctccacttcccgggttcaagtgattctcctgcctcagtggattacaggtgcacaccaccacgcctggctaatttttgtatttttagtagagatggagtttca[132 bp omitted]aattacagtagcattctcttatttaaaatatttgttttatttaagtcagtgtttaagcaatagctcagcatatcccagtggtccagtgaccacacagctgagaacccttgttaagtggtacagtaaagcattctgtcaaaactttgacatttatgacatgttacctaggaaataggacttagaaaatgagtttgacctgggctttaaaaaagtatactgatgaaggtgccagaattgatgtccattagactgtaagctccatgggggcaggaactttgctaccgaatctatacaaccttaacattgactagtgcttgtaggtgtgctcaatacttgtttgttaactgaatcaaaaggagtaaatgcacaatatttgaacattgtatccaaaggaagaaacctgcgaaataaaattatttgcagaaatgaacatttgttgaaatgcagaaaaccactggatactgcagcctacaatattaatatgatattactcttttacagttgacacctgtcctctctgtagtctcttctctcaaatttggttcttattgagagcctgtctagtttcccaaaggttttataaaacataagttgaagtacctttatttttaattttatttttgagacaggacctcgctctgtcaccgaggctggagtgcagtggcataatcatggctcactgcagcctcgtcctcccaggctccatccatctgcccatctctccctctgagtagctgggaccacgggcacgtgccaccacacccagctaatttttgtatgtttggtagagaaagggtttcaccacattgcccaggctggtcttgaacacctgagctcaagcaatccaacctccttggcctcccagtgttaaattacaggcgtaagccaccacacccggccaagttgaagtatattttgtgatttttctgacagtgcagactgaaaaaaatttaattaacctgacaagagtttactgaatatcacacaattgagtttttaatccattaatgttaaggcaggggtttactctaacacttttaaagtgtcagaagtagttgccaatgccaaatttttatcagcccccttgaatttatttgatttctgactttccacatttccatccagactttgacatgattgccgtctaataactgtagcattctcttattaaaacttctggctgggtgtggtggctcatgcctgtaaccccagcactttaggaggccaaggcaggtgaatcacctgaggtcaggacttagagaccagcctgaccaacatggtgaaaccccatctctactaaatacaaaaattagctgggcatggtggcaggcgcctgtaatcccagctactcaggaggctgaggcaggaggattgcttgaacccgggaggcggaagttgcagtgagccgagactgcgccattgcactccagcttgggtgacagagcaagactccgtctcaaaaaaaaaaaaaaaaacttctgaggtaggggctgtaccatatttttgccccacacccattaagcgaataccaaaaacaacttgtggaaatttgataattttatcaaatttattatttgggcaggattggcatttaccatgcttttccctattgctggcagtaaaacatgggtttaaggaagagtgtttttcagaatttacactgtatatctctgatttggaagttatataattggaatttatgattatgagattaaaataccaaaaagactaagtaacatatcagtgatgtcaatgaattgttttaaatggaagtgtgtgttcctctataataatttgacttttgatattttcattcctgtattgacctgaagctattaaaatggcggcaggtatctgtaatgacaggataaagaaaaaatatgggctttggaagatcatagactattgcctttgtagcataatgaaatctatacatttttatgagtgagtgtgtatgtacatgcataagataatatgtaaaggatacttttttttttttagcaattttctcttgcaatgagcattttgtggtatttttccattttataattccataaattacattttaatttcttattgaacatcagtattaccaaagcagtaaattatgtacattagaattttaaaaagtgctatatgataatcccttcaaaatatgattgttctatattgttatatggcacataagatcataattaatagattctggaagccaattttaaaaacaaaaaaattctctgaatatgtggataaatggatgagtgtgaacaattgtatctttgcaattaatgtctgctacacttcttttttttttttgagatggagtctttctctgttgcccaggctggagtgcagtggtgcaatcttgaatcactgcaacctccgcctcgcgaattcaaatgattatcctgcctcagcctcctgagtagctgggattacaggggcgtgccactatgtccaactcagttttttttttttttttttccccgagacggaatctcactctgttgccaggctggagtgcagtggcgcaatctcagctcactgcaacctctgcctcccaagttcaagcaattctcctgcctcagcctgctgagtagctgggactacaggtgtgcaccaccacgcccagctaatttttgtattttcagtagagacgggg[131 bp omitted]tttcaccatgttggccaggctggtctcgagctcctgacctcaagtgatctgcccgcctcggcctctcaaagtgctgggattacaggcatgatccactgtgcccggccttgcttgctacattttttaaagcattaatctgtaacacagagagaatcctggaaatgaaaacaaagtggtatacatatgttagggaggtatgtttaaaaaggttcactgaggaaaaagtgtgcataagagcagaatatagtgcaatccacttactggatgtggaaccagtaaggacaaagagtgggtttgaatgacattccatattccttggacatgatggtgatattttcagtgtagttgattaaagcatgggtccctaacccctaggccacagaccctgttaggaacagggccagacagcaagaggtgagcagtgggcaagtgagcaaagctgagttctgccttctgtcagatcagtggcatgaaccctattgtgaactacgcatgtgaaggatctaggttgcagccaggcgcagtggctcatgcctttaatctcagcactttgggaggctgaggtgggcggatcacctgaggtcacgagttggaaaccagcctggccaatatagtgaaaccccatctgtactaaaaatacaaaaattagccaggcatggtggcaggtgcctgtaatcccagctacttgggagactgaggcaggagaatcacttgaacgcaggagatagaagttgcagtgagccgaggttgcgccattgcactccagcctgggcaacaagagcgaaactctttttttttttttaaagaaaggatctaagttgctcgctccttgtgaaaataaaatgataaatgtaatgtgcttgaatcatccccaaaccatccccatccccccacctcaccttgtggaaaaatattgtcttctgcaaagctggtcccctgtgccaaaaaggttgtgaactgctggattaaagggctttactcaataaattatatctaactggggagacttttttccactattgattttcttcagtataccttcactggatgcttgctactcattaaggtccatgctacctcaatgtgcatggtatgctggggattgataataccaccttcacattcttgtaattcactaggaggactcaagacaccctatgttatcatagtcactatgatttattgtagtaaaagataccaagtcagttgagcaaagggaaaatgtgcatgggatgaagtccagaagaaatcaggtacaggcttccaataatccactccctgtagaatcattcatgatgtactgttttttcagcattgaaacatgtgaaatgtctacccagtaagctcaatggagacttagtgccctaggcactacgttgtgttttgttttggaactggtcacataggccagcttgggccaaaattctagattcccagaaggaattcagcataaatcacattatacaaatagccggggcatggtgagccactctcatcagagaattgtggaaatcctcctgaaattcaagttcccagataccagtcaagggctaaccttatatcttgcgctgctataacagaataccacagattaggtaatttataaacaatataaatttatctgtcatagtgcttgaggctgggaagtccaaggtcaagatgctggcaggtttaacatctggtgagggctgctgctgtctgcttccaatatggcatccagttgctgcatcctctggaggagacagatgctatgtcctcatatggtggaagtgatgaaaaagcaagaagggattaagttttaacaagggaacaccatcaaactatagcatgttgcaagcaggccttttaagtacaacagtctcaggcctatgttaactcttttctgaacaaagggcttcagaaatccagtacctatattcttttctttctttttctttctttgtatcaccagataccacattaggtcatcttccttcaaggtaatttgtaaccaaaaccagtagactaaaccaaataatttcttgcccctctgccccataactgataagactgtaggtacagtctacatctaccctcctcatgaccagagttttcaggttagtcacaagacagctgtagaagctgggagctatctggctttgtttttggttggttgttgtttgttcacagtcaagaggagagaactgtttcatttgtaatattgtatagttcatgtctcccaaaatgcatggctactctaactcccattcacacacaagattaattccttagctcttacctagtatgcccagcccttgtgggatcattcagttttttcatctgtgggcctaacttgcctgttcatctttggccgttgggatttccctgtcttagctttgagtttagctacattttaacgctttaggggatattgtcacataacatttttctatctttgaaaagatccacaatattatgtaatgattaccactatctaatcctagaactctttcatctgctcccaaaagaaatcccctacatgagctgggtgtggtggtgcatgcctgtagtctcaactacccagggggctgaggcgggaggatcacttgagcccaagaatttaaggctgcagtgtgctatgatcatgcctgtgaatagccactgtactccattctgggaaacataacaagacgctgtctctaaaaaagtaagaaaaaaaaaaccctacatattgacagtcactccccattcccaactacatctccccagccttggagacaactaatttactttctgtctctatggacttgcctattctgcacatttgatataaatggaatcataccatatatggtatcttgtgtctggcttctttcattggacataatgtcttcagagttcatctatgttataacatgaatcaatattttgttcattcacattactaaataatattgcattatatggctagaccacattttgtttatccactcatcagctgatggacattgggtcttctccactttttgactattatgactaatgctgctatgaacttttttagaacaagtttttgtgtggatatctttcagttctcctgggtatttacttaggagtgaaattgctggcacataagccccagatcgggtgccagcagattcagtgtctggtgaggtcccgctttctaagtcatacatggtccttctggctgtgtcctcacataactaaagaggcaaaggagctccctcaggccacttataagagagcattaatcctattcatgagggcattgccctcttgatctgatcacgtcccataggttccacctcctaatatcttcttgggagttaggatttaaacatacgaatttggtgggggccataaacactcagaccataataatacctaaagagaagtgagggattctgggaaatgaaaaccaggagctcaaggtagttggacacttccacatcagaaggcttggacattccggaagtgtagtccaggagggcggtactgttctgtttttcccccaactccagcattctgtgatatgtagtccggagttccgtgtagtcgcgcatagctcagctgcagtaaggctgtaaatgtttcccctgcggaatcctgggaactgtaggtccaatcgttctaggtagttgtaggcacttccggctcgaggaaggcagtgctgtggaattctgggaagcgtagtccaggtcctcctgatactcgcaggcacttccgcccaggaagacgacgtagcagccatcttttccctggctttggtgattcaggtcagcttctcaggaacctttcaaacttccccgaaatgcacttgtggtcagcagctagcggtcttttgtttggggaaaaaaaggagtagcggctaagagcggaggtttgaggggccaggatgctgttttgcgtttccctgggcggagcttgttagaattgggggcgtactggcttcgggcggctggggtgatgcttcgtcgggtttgaaggtctctcgggctgttcgctccctcattgtgactcccccacctaatgagccagccctaccacttcatacagtatcacattgagcgagttagttaatccccgtgccttcgtttgctgttctgaaggaaaataaaagcaaaaacttcctaatagaatgttttgagagaaaacgaggtaatacaaaaagtgtaaaactgcctggcacgtgaattaccaatactactgtaattttcctagaaactcccgttctgtggcgaaattctgtgagtccatgaagctggattgtccctgacctcttttgaggaaggagagggttgcttctaactggtcctgggagatgccactgtgatgtatccgggatgaagacacaatcctggttacttcatagcctgtttttcttccccagccctgacttctcaaaaagcactgcacagaggaggaggcagcagaaccccatgtgagtaagacttgttgttattcttgttttattcacataaatcagagaatgtgtggggtcatgtatttgggcatgagaagtgattataatttagcgttagttgctaagttccattctaaggggtttatacaaatgaacacctttccactatacagtggctctgtgaagtgatactctttttccgaggagactgagacataagaacataacttgtttgctcatagccacctagctagtaggaggcagagctagcattgaaaccgaggcagtctgagtctagacctgagtcttctttggtatgttctgcatgagccataggcagctggctagtatcatgtgaaaataggttgggacttcactgtggggactttgctcaaggtctgggctattctatgacttttaaaaaatagtggctgggcacagtggctgacgcctgtaatcccagcactttgggagtctgaggcgggcagatcacttgaggccaggagtttgagaccagtctggccaacatggcgaaaccccatctctactaaaaatacaaaaattagccaggcgtggtggccaacacctgtaatcccaggagtttgggaagctggggcaggagaatcgcttgaacccaggaggcgaggctgcagtaagctgagatcacaccggtgcactccagcctcggcaactgagcaagactctgtctcaaaaaaagaaaagagtttttaaaaatagttttctcaattattagttttatttgtttcaaataatatagaggtaacacataatcatggaaaacacagaaatacatttaaaaaatgtaaattccccatgaccttagggtataaagataacaactatagtttagtgcctttctgtcaagtttttcttgtatatatttctgtttattaggggctgttttgggagagggactgagtacagtgcaacactactcaaactgtggttcacaaagcagcaacattggcatcacccaggtagaaaggctcattcttgagccctaccgaaggccttctgatttagcatttttgcagataggacccagaaatctgcatttcaacaagatcccaaggtgagcgagatgcatgttaaagtttgagaagctcaggaaaaggtcttatctggaaactcaggactagaaaactgaccctgccagatgtcacagataaaactgagctggccatactagaaccctactcagtccagtgatttttctttcccactaaatattaactgtcaagtttctttgcaaaaaccatgacatgagtagaaggcagctgtcaagtctagagtcaaaatggagaaactcagagtcctgaagatctatttctcccaggctttggggagtagattccttcccatcttttgtactggaggccttctgcctgaagtgggaagatcagctacctatttattgttaattaacgttagatattattgccatagttgtcatcatctcgtcatcgttattattctgattaatgactttcctaatttctttaactttttttttttttttttttttgaggcagagtttcacttttgttgcccaggctggagtgcaatggcgtgatctcggctcactgcaacctccgcctcccaggttcaaaagattctcctgcctcaacctcccaaacatctgagattacaggcacccgccaccacaccggctaatttttttgtatttttagtagcgatggggttccaccatgtttgccaggctggtctcgaactcctgacctcaggtgatccacccacctcggcctcccaaagtgttgggattatgggcatgagccaccgtgcccagccaactttttttaaaaatataatttcaaacttgtagaaaagctgcaaaaatgataacgtaaggaaatctcatatactctacacccagattcaccagttgttacgtttgtttgttatgttatgttttccctgtgtgctctgttgatgaccatcagccatcaccaggaacatacctgtaaccaacaacaattgtttgttttagcttgctgcatccaaggagcccacacatgcatggggtgtcttggtaagaggcaattaggaggaccctggttatagggttttggtttatgttagatgagttggggagagttttaggcaatgggtttgttctggattggatgctgtgaagaagcagtagtaatttgatcagactattgtaatttttatgttggaggtggggaaataacaagactggagttgtcactgataacaaagtggtcatgttagatggaagaggcaattatttggctatttttatcaatgtaggatgtatttctctctgtgttacaagctgttttgtttttttctttttcaccatgatcactgagtagacctgtctcattcttgttgataaattggaaacaccaggttctggttgttgctgctgttgtcaaagtagttttttgttttgtttttttttttgtctttttgctttcacaactttgtcatacttatattttgtttttgtctttttgctgaagtatttgagagcaagctagagatagtgatgaaaatgaaattagttacattgataacttactgttatctaacccacagtttgtatttaaacttactccattttcccattaaagactttgaaagtaatttcttcccccagatgagtttccagtctaattgtatgcattgcacttagttttggtttcattagtcacctttagtctagaatgattcctcagactttatttcttttttgctctcgatatctttctagagtattgagaaattatttgtaaaatgttcttatttttttgtttccttaatatttattcatgattaaattcaagctatgcattgtcagcagagatgccataaaagtagggaggcatccttctcagtgcatcataggagtcaaatgttggtttgtgggtttgtcccactagtggtctcaactttgtttttttggataaaatgtctgccaggttacctttttccttttgcacttaatactttgagactatgtagccatcttattcctcaccaaactcaccagtttttagcagctattgatgatgttctagttatctttcattctacctttattagtttatgtgttctactataggagctttcttttgtcacccatttatttattac[138 bp omitted]cctccgcctcctgggttcaaacaattcttgtgcctcagcttcccaagtagctgggattacaggtgcctgccaccatgtccagctaatttttgtcttttagtaaagacagggtttcatcttgttggccaggcttgtcttcaactcctgactgtaagtgatctgcttgtcttggtttcccaaagtgctagtaggattacaggcatgagccactgtgcctggccaggttcctgcatttttaatttaagttaggtatggattgtcaaacggtgttttttaattgcggtatcttcggttttattagttcagtgttggcaaattattggaaagacgacaagatgtttttcagaagttataagacactttcacgtgacatagcaacaacctgtgaactccaactatcttataatattctgttggtggaaattatatttttaaggataatttcaaaccatagaccatcttctacttattgcagttgcaaataaataagatacctgactgtgttgtaagagctttctaccttccagcaatccgatgaggttggtactgttattctttaccacttgcagatgacagaagtaaggcaaagagatgttaatagtttccccaaggtgacgcttttagtgtcaggattttaacccatgcatatcaattccaggcctactgtacttatattgtctcaatttacgctgtactcaaaataagaattactggcgtgcaattacaggcacatgggcagtgaggccactgtgtggttagcctggttctgaactactgctgaaaggggtagttggatatctgggatccatgtcataatctgcttaaaagccacataaagctgcagccaccccaagaagcacacacctttgctaattcctaaagagcagccacgtgcattagcaacatacttacccagttttgatttatttctctcttctttcctagttcagcttcttaggactctgcacttccccagaaggaagaattaaaaatgaatatgttcaaggtgagtagagcttgcctttcccagctgttaaaaataccattttagtactcagagatggaaccaggtttttctttttcaagtaagagtcaaggcatctgatgacctgttgagtgtgctaggtgcttattttgttccgtttgagtttagctggttttggttttagttttatttcgtcatttttattttacaa[266 bp omitted]tggaaaccccatctctactaaaaatacaaaaaatgagccaggcgtggttgcaggcacctgtagtcccagctattcgggaggctgaggcaggagaatggcctgaacctgggaggcggagcttgcagtgagcagagatcgtaccactgcactccagccagggtgacagagcgagactccgtctcaaaaaaataaataaataaaaaataaaaaaattagccaggtatggcggtgcacacttgtaatcccagctactcagttggctgaggcaagagaatcacttaaatttggaaggcagaggttgcagtgagccaagatcgtgccactactccagcctgggcaatagagcaagactctgtctcaaaaaaaaaaaaaaaaattaatagaaatgaaaaaatcttatttccataatctcttcattgtatgtacttgtaattatatattggcattcataacatagatataattttacatttcttacatttataacatttatttttgttgtatttctatcaaatttatgtatccagtttttaaactattctctatatacagttagtgtaggatttttactgttttaggaactacagtgttagttttcttgcatttaactttttctgaaaaaatcaattttgaaaaatactgccttttaaaatccgtaacattaggtattcagaattgaaaaggtatgttttgtgtgtggtacttcagattttttttgatagaatattcaaatatggcacagtgtgtcaagatttaacagctgcttcacccagaaaaaatattagacttttttttactacaagagctagattctgtcttccccatgcctcagtcataccctgtgtgtttactggtctttttcccttttaatattttttttagttaaagtagtatgtgaccttaatttaaaatgcctagtggtaggaaaggatttgccaagcacttacactctgcccctgtattgagacctcacagcaactatgaagaggttctttgttttgtctccattttaaacataaatagaaaagggcttgtgaaaaatgaggaacgtgctcaagttcacatggaaaactaaagatccgggatcagtgtattatattcaagtgaaagaccaagacaggaggacagagagagtccttcattcagaaacctgacatgccctttaggtttgtttccacatataacgctgctcacttggctcccacctcagtaggaaggcaggtgctatcaaacactattgggactcaattggtaaacctttctggggaaattggcaatgttttaggttcagcaggtaacagttccaggaaattcccttataagagtactcactgagagcatccagtaaatatacaaagctttctttttcacagcagcacttttggtaagtcagtgtatggcattggcaagacaggagaagggctgggaaatctacaaacggctgggcatccagaacaactttccacctgttctcagtgttacccatcttctagtggacattggttgtaagattgaggtcatttgtttttgtcgtaggaagcagtgaccttcaaggacgtggctgtggccttcacggaggaggaattggggctgctgggccctgcccagaggaagctgtaccgagatgtgatggtggagaactttaggaacctgctgtcagtgggtgaggacagcctccctctggaatatctttgtgcccttggagttttaaggctttgtggcccttgaaattgttccctgagtgtgggaatctgactttcctaatttttgtgggatgcagagacactggatgtttctggtctttctgaacagaatattttaggtctttttcatttgtgttttatagaagaactgtaaatgaacagaatactgctatgccttgtctattctttttcatgttttacacctgtcccagtattgaattataaaaccaacttattgaatgtcatcagcagattttaatgaaataaaatagggtagaaaatactagaactccttaggaagaatggcacacactgcagcaaaaactctggccaattgcttgagtgatgtgagaaccaatgggagatttaaggaaaacagacattagttaaaaataggttattcaaacttggttttcataatatgtatttacgcatgtgtgtctgggtcatgaaataaatggtgtttctttactgaagtcacaatttaaataaaagtttgaaaaacactgctttcagtgtcttgaatgtgcagttgcaactcagatttccagtgtattttaactctaatatgttcattttcaacttgtgatttggcattttcacagggcatccacccttcaaacaagatgtatcacctatagaaagaaatgagcagctttggataatgacgacagcaacccgaagacagggaaatttaggtaaaaaccaaacagttatgagttcttatagttaactgtccatctgctttgcttcttcttagccttgttgccatcacctggtccaaattgccaactgtctttcctggattattgcaacaccctttgtactgcttgccctgctcccacccctctcctcttacattctgttctttaagtggcaaagtgagtttttgttaccttgtgtcagactatgttgttcttctgctcaaaattctctgtgacttattttacatagagtaaaatccacttaatgtggctgacagagtcttacacggtgtgcttttcatcccccactacctctctaaatatatcttctatactctctttctgtgaattccagccacattgtcctccctcttgcttttcagacctatcaaggatgcttctgcctcacaaccctgtgtgttcttccctctgcctgaaataatcttttacctataatccttctggtcccttcttcattcatttctttgctcagttttagtattataagaaaggcctcggccgggcacggtggcttgcgcctgtaatcccagcacttcgcgaggctgaggtgggcagatcaatcatgaggtcaggagatcgagaccaacctggctaacacggtgaaaccctgtctctactaaaaatacaaaaaatcagctgggcgtggtggtgggtgcctgtagtcccagctactcggcaggctgaggcagaatggtgtgaacccaggaggcagaggttgcagtgagctgagatcgtgccactgcactccagcctgggcgatagagcgagactgtctcaagaaaaaaaaaaagaaaggcctcctctgaccaccctattaaaaatacattctctccatttactctctgtgcactgccttatattgtgtgtaagcactgattatcacctcatatatgtttttgtttagtgacgtttgtctcctcactggagtgtaatctccaggagtggaggaatgttatctatttgcttctgtctcctcagtgcttagaatagtcctagtatatggcagagacactataaatattagttgaataaatgagttaatggaaatctgtcttccatggaggtaactaataggtggtgaacaaatcagcataaataagggatattgcaaaatattttttgtcttctaatgaattcctaacctaattctaatttctctttgtgtgtgtgtgtgtgtgtgtgtgtgtttgcatgtgtttgcctgtctgtacaagttgacccatatcttggggaacctatagtgtcatagttgtaaccaaactgaataacatgctttgtttatgactttctttgagcatttgtagcagagcatattcattcggggagggaatattttacaataaggacttttatttctatttcttaggtattcccccatagaagggaataaaattcgatttccttatccattatatcaggaaagaaaaagtaaaactaaaaaccaggacatgagcattagcctttccctcaaaatgtttgcacagttgcatcccatttgcttcttccaaagtccacattcataaaaagaaatggatcttacattgttgcctctcaaacatttatatcgtgtaggcttatatgtatgtctttagaaggccttttatgtaatgacaccattactgcttgtgattattctgatatgatactttatctgtttttttttcctaaatatcacaagctattaaatttatttcacaattgactagtagaccactttgtcaatttggaaaacattcttgttaaagacaaacatatctacatccagaaactttctataccttgctttcaaagagacagcattctttgctagccttccaattttgactcagtgcaaaagccttagaaggatccagtgcataggtcttcatgctttcctttcaccccaagtgattatcaactttgatttttctcttcagcaataactcacttggtgtacccctacctcaggtacagcttttcaactttgcagcaaaactgtactttctagttctttttgtatttcagataccttacttgtaaaagctcttttgctctatgacctggctcaaacttaaacttggatttgaagttagaagaaatgttggaagtcatttatatatgaagaaatgttggaaggactcatatatgcatacattccttgagtgactatgaatgactgccgggcagtaacttctgggctgtggttgtaaactgtgagcactacaaaatgtttttccttattgataccatattatggtaggaaagacatggaataaaaaatttagatagtatgtcagtagttgtgtttttaaatgggtttcattagtgcttagcaattgggagcttggtggaccatctcttggttttggaccatctcttggtttctgtcagtatgtaaaccagaaacttcaaatgtgtcacaaaagatgagcagaactatcccgaggttcattaaagtcttttactctgtcctcagtgtgaaatcttaaatctttgaacaaaaaaattcactatctctctgaatcctttgtccttacaggagagaaaaatcaaagtaagttaattactgttcaagacagagaatcagaagaagagctttcttgttggcaaatctggcaacaaattgcaaatgacttaaccaggtgtcaagactccatgatcaataattctcagtgtcacaaacaaggtgatttcccttaccaggtagggacagaactgtctattcaaatttctgaagatgagaactatatagtaaataaagcagatggtcccaataatactgggaatccagagtttcctatcttgagaacccaggattcttggaggaaaacattcctgactgagtcacagagattgaacagagatcagcaaatttccataaaaaataaattatgtcaatgtaagaagggtgttgatcccatcggttggatttcacatcatgatggtcatagagtacacaaaagtgaaaaatcttatagacccaatgattatgaaaaagacaacatgaagattttgacatttgatcacaatagcatgattcacacaggacagaaatcgtaccagtgtaatgagtgtaaaaaacccttcagtgatctctccagctttgatcttcatcagcagttacaatcaggagagaagtctcttacatgtgttgagcgtggaaaaggcttctgttacagcccagttcttcctgttcatcagaaagtacatgtgggagaaaaacttaagtgtgatgagtgtggtaaggaattcagtcagggcgctcatctacagacccatcagaaagtccacgtgatagagaaaccatacaaatgtaagcaatgtgggaaaggtttcagtcgtagatcagcacttaatgttcattgcaaggtccacacggcagagaaaccttataattgtgaggagtgtgggagggccttcagtcaggcctctcatcttcaggaccatcagagactccacactggggagaagccattcaaatgtgatgcatgtggtaagagcttcagtcggaattcacatcttcaatcccatcaaagagttcatacaggagagaaaccatacaaatgtgaggagtgtggtaagggcttcatttgtagctcaaatctttacattcatcagagagtccacacaggagaaaaaccctataaatgtgaggaatgtggtaaaggctttagtcggccttcaagtcttcaggcccatcagggagttcacactggagagaagtcatacatatgtactgtatgtgggaaaggctttactctgagttcaaatcttcaagcccatcagagagtccacactggagagaagccatacaaatgcaatgagtgtgggaagagcttcaggaggaattcccattatcaagttcatctagtggtccacacaggagagaaaccctataaatgtgagatatgtgggaagggcttcagtcaaagttcgtatcttcaaatccatcagaaggcccacagtatagagaaaccttttaagtgtgaggagtgtgggcagggtttcaatcagagctcacgacttcagattcaccagctgatccatacgggtgagaaaccatacaaatgtgaagagtgtggcaagggatttagtcgtagagcagatcttaaaattcactgtaggatccacacaggagagaaaccatataattgtgaggagtgtgggaaggtcttcaggcaggcctcaaatcttttggcccatcagagagtccacagtggagaaaaaccattcaaatgtgaagaatgtgggaagagtttcggtcggagtgcacatcttcaagcccatcaaaaagtccacactggagataagccatacaaatgtgatgagtgtgggaagggcttcaagtggagcttgaaccttgacatgcatcagagggtgcacacaggagaaaaaccatataaatgtggggagtgtggtaagtacttcagtcaggcctcaagtcttcaacttcatcagagtgtccacacaggagagaaaccatacaaatgtgatgtgtgtggtaaagtcttcagtcggtcttcacaactacagtctcatcagcgagttcacactggggagaaaccttataaatgtgagatatgtggtaagagcttcagttggcgatcaaatcttacagttcatcacagaatccatgttggtgataaatcctataaaagtaataggggtggtaagaacatcagagaatccacacaggaaaaaaaatctataaaatgattctttgtgaagactcgtgtcatttgaattcttccagttatcaagtctcaaagtcagtgtttcagccgtagctcctcatgtcccagtggtccaaagacaacaaaacaatctttatgattagcatagcaagggcttctttagtcagaaccttgacctttataaaatgttacttagaagaggggtgttaagagtgaaatttttctcaggccttttataaaagtatcatggtggacatgccaaaattaagtgtccactagaatgttaactccataaagacagaaactttgttcactactgaatctacataatcttaccattgccatatacttcacaggtgctcaatatttgttaataggtcctttttgaaaattatgttgagatcacctgcagaatatcatgaatttgtaaacaggaaacctgaaagtagccttaataagattaagtcgggagaccattgaaatgtagaaaaccactcaatactgaactccccaatgttaatttggcattgtcttgtgattagatcctgtcctcctttagcctcactaatcaagttgggtcctatcttcccagatgtctagttttctactggttttataccatatagattcaattatcttttgtaacagataattgtgttcatcttgtaataactggacactacatactacacttattttttcaacactgttaaggcaggggtttaagtgtcagagttgctaatgacacattttttagtagatgttgatcattggttttttcacattttcattcaggctttgacatgattgccttctaagggctttagcattactttaatcagagtttaggttgcggctattgcagatttcttttgtgaacttctctcccccatattctgagaaaaaggacaaaatattagttaaaatttgataaatttcatcaaaaatcgatttttggagcatgactttcaccctttttcctagtggtggcagtgaaaaaaatgcttttggaagagaagttagtatgtatcagaatatagaatgtgcatctcttttttctggaattcatagaataggaatttttgattaggagattcaagtagaaaatgtaagtagcacatcagtgttaatgaattttgtaaaaatagaaataattttttatatactacagtaaaaaggatccttgaaaatgatgaccaaattttatgacagaagagtgtaacagtttagtttaagaacatcacaggctgggtgtgatggcccacgtccataatccccgtactttgggaggccgaggtgggtggatcacctaaggtcaggagttcgagaccaacctggccaacatggtgaaaccctgtctctactaaaaatacaaaaggtagctgggcgtggtggtgcgtgcctgtaatcccagttacttggggtgttgaggcaggagaatcgcttgaacctgggaggcggaagttgcagtgagtcaagatgttgccactgcactctagcctgggcgatagagtgagactcagtcttaaaaaaaaatcacataccttaaattcgtgtgtgtccatgtgagtgaatagtgcatctaatcgtgagtctgtcctatgccaccacagcatcgaagagaatgcaggaatttttttcacatttaacttctatattttaattttttaactgagcatcggttttatagtaaaatactgttattttacagtaacatagtaaaaatataatttaaaaaattactagaatatattaatcccttacagttaagaaatcttgtgtcatcatatagcatataaggccaaaattaaagaatggaactctggaaatcaattataaaaacttgtatggtggttcaaagatacagatgcattggtaagagtgaatatatatttgcagtgaatgcatttgaagctgcttcttaggtacaaatctatgcaatcaatacagttttaatgtaattccagtagtaggaatgcttcttaattcttgacagacttactcactggctgaatggatagataacccagggcactggcttgtcttttcaagtgcttggtctgattgggggaaatggctgggcctttctaggtactgtatggcaaggaaaatcgagctgtggaaaaaaggaataataaaatttacagaggccaggtgcggttgctcgtgcctctaatcccagcactttggatggctgaggcaggtggatcacctgaggtcaggagtttgagcccaacctggccaacatggtgaaactccatcactattaaaaaaaaatacaaaaactagtcgggtgaggtgatgggcgcctgtaattccagctactcaggagtctgaggcagaagaatcatttgaacccaggaggtggaggt[137 bp omitted]ttttgaggtaaaatttaacaaagattccctgaggaaaagatgtgcgtagggagagaacagcatgatgccagtgaaaacaaactgggaacaggcagttaagcaggatcgaataccatttctttcttaggcgtttctgtgacatttaaagcttatttggttaaaggctttactcagcaaaggatatatctgtgaggtttccacaattttctctatttggattacaattcctgttgttcctggactgcatcttcacatgctaagtatgtaaagtccatgatacctcaagttgtgttagatatcagaaatcctgagtcttcgatgtttagtttgctcttagatatcaggatagcccaccaactctcagtagcttagtgagttaagtcaggggtcaaaaaactaccccctgtgggcccaatccagcccacttccttaaaggtttattagaatatagcaatgcctgtgttttagtgtattatctatgctttcttgctgcagtgtcaaaatttagtagttgtgacaaaaactatggaccacaaaatctaaaatatgtgctttctggccctttacagaaaaacgtgtactaagccttatgttaaaccaaatgatttgtctcccataacttaaaaaagaccccaggtagagcaggacttagacctgcttctgtcaggattccaaaatgattttttttgattctcatatctgcccttctggttaaccctggtctttaggttcaagatggggctagcaaccagggagcacctatcttttcttttcagtcagtggaagggaggtgctctttcatttgtagtgttaggtagtttactactcacagtgtttgtggctcctctggccttgattctcatctacactcaagattagacagctagttgtgtgtccagttcttttggcctttgtgaactatcaagtttcaactcagccaggtgcagtggctcacacctgtaatcccagccctttgggaggctgaggtgggaggatctcttgagctcaggggttcaagattagcctgggcaatatagtgagaccctgtctctccaaaaaaagttttaaaagttagctagccatggaggcacacatgtgtggttccaggtactcaggaagctgagatggagggatcacttgagcccaggaggttaaggctgcagtgagctgtggtcccaacactgaactgcagcctggtgacagagttgagacactgtctcaagaaaaaaataagtttcatctctcccttgcaccatggactcaacttccctattttgagcctccaggagatttttctatcttagcttttagcttggctgcatattaacatttgggagaatttgttatatattatcaggattcctttgtttttgagaaagagggatgcaaagccaaaatcagcggctgaatgacaacacatttaattcagaacttttagggtgtcttatgtcacaaggcatcaatgagaaggaatggaatcctgaaaaatttgggaacagatgagcagattccaacaaagctgagggttttgctcaatctagctgagcatctcttgccgttagaaggagcccttcttcctctatttgaagtcagtctcccttgcctgaaaagcctgtgatgaccttccctgagatggtttccttgcaaaaggctttagatcctcaagacttgcttccactacctctcatttttctagaccaataatgaaactcgggtcttcacagacaatgggaggagtcaccaagtagaaaatacgaccatgaggagatacatcgccaaagtaaggatttttgtaatttatatcaatagaaacctgagaaatagatatggttgtagatcttaccagtgttgaatcaggtggaaataatacaatgatggattaggctggatttgctgatatgggtgtagtgaacagtgattccagacccactgttagcttgagcacctgggaatagtttcaacagttttctcagttgtatgaaacttggatgcaaaaacgttagcctaccctaaagtaaaaaaaagccagaactttgtaagtatgttatagaatttctcgaccttggcacaactgacattttggactggatagctctgttaggggatgctctatgcattgtaggatgtttagcagcatccttggcctctagccactagatgccagtagcacacgtgatgcgcgcgcgcgcgtgcatacacacacacacacacaaacacacacacctcagttataacaagcaaaaatgtctccagacactgccagacagcagtgcgggggtttggaaattgtccccaactgagaaccagtgttatagaacatatacagagacataggaatgccagaatgctggagtggatgtatgtaaagccttactcaacccttgtactctgggaagattcggaagacactctttgccaaggacttgagaagttcattggcgagaggagcattggcagtttgggagagctctgtagtaactcttctcggcagaccaggaatgggagaggaaaattgtgacattgaaatgggctttaaaaaaaaattcaatgaggatgatgggatcctggagcattaggggtcaagtggaggcactttactggtagagacaaaatgagtgcgtttatcacaatgatcagcaaagtcaaagggattatcagagatctttgcatttgttcatagattgtggtgtccctctggctgaaatagaccagaagcctactgaatccctgcttgatttgaataagtggaaagactctgggtctggtaaatcaacatgagagagaattgtggcctctaaggcaattacataatgtgaatgagttctcattcccagaacaccttgaatgaagtgtaggtcaagtcttcttgagaaagtacactgatacgctgccgaaactgacttatactaccataaatcatcctgcacttctgcaaagtgacttggcaaccatatttaatggagctgtgattaggtaattggaaacagcctgaatatggagggattgattactggtcactagagctgaattgacattaactctgagaaccctaaaatgtcactgtagcccaccaggtagcagaagggcttatagaggatgaataattaatgaatgtttttgcttaggcccgtttgtggtggtctgaatggagccctgaactcatcctctgattatttcccaagtttcagaatgcagaattgcaccagctgcattcaatagctgacagaatcctcatactgaatgttccctgatccatggaaagagggctattttgccaaggacaaacactataaatgctttgtatgtgccaaaaaaaatgataacctgaaagcaaaaccacattcatggaggaattgcagaggttagtgccactagcagtatcttgaaagttgcaagggttatggttctatcacatcctgattcaaccctggtgatcaatagggtgacagatgttgcagccagatcaccttcatgttcatatgctgattgattcactcaattgacgtgtgcagagatacttatatcctagagaattacatgaaattatttgaaatttaattagaaattgacttcatttgcagttccagatgtggttttatttctacagcaaatcaacatgtctgctggcacctgatatagagagccaccaagccaatatgtgcctttttctctatacctgcctgtaaatgtcatccacagaagtttagtttggtagggccatcaatacacttttaaggtcccagctcagttctgtatctactttccagtatttttcacaatttacccagggattggtaaactatgtttcatggactaaatctcctgcaacttgtttttataaattgtctcattgaagcataaccataaccagtttttacatattacccaggagtgcttttatgctaaaatgacagtgttgagtagttaggccacagagatcatgtgatctgcaatgcctaaaatatttactgcccggctctttacagaaataactttctgacccctgctctactctgtagatacaatgctgattgtactttctaagcagaaagaagcaattacaatagacattttggttagaagatggataatacaaaaattcaggagc[133 bp omitted]aaccctgtctctactaaaaatacaaaaattagccgggtgtggtggcgggcgcctataatcccagctgttcaggaggctgaggcagagaactgcttgaatccgggaggcggtggaggttgcagtgagccgagattgcgccactgcactccagcttgggtgacagagcgagactccattaaaaaaaaaaaaagatttctaaaggaccagtggtatcggatattccaagatacctgttccaaagtgaagagcaaatagctgcatatgacccttctaaaaccaccagggaagagacacaatgactactaggattcttagtgagttttgtatgtgtgtgcttcactttaaacatttattatggtacaaaaacacataacactaaatttaccatcttaaccatattttatcttaacatttttaagtgtacaattcattagtgtaaattgtattcatattatgcaacagatctatagaacttttcatctcacagcactgaaaatctataccagttagatactatttcctcccccctcctcccagcccctggtaactacctttctaaattttgttcctataattttgactactttagatacttcatgagtagactcttacagtatttgcccttttgtgatttgcttatttcacttagcataatgttctcgaggttgattaatgtcgtgccatgtggcaggattttcttctttttaaaggctgcataatattgcattgtctgtgtacagcacattttctttatccattcttctgtcaatggacagttggattgcttctacatcttggctataatgctgtgatgaatatctattcctttgagatcctgctttgagttcttttggatatatacccggaagtgggattgctggattatccagtaattctatttttaattttttgaggagcctccatattattttccataatggctataccattttacatttccaccaacagtgcacaggtcttccaacgttacatccttgacaacacttgttatttttctcttcctttaccagtgaccacaatagtgggtgtgaggtgatatctcattacagttttgatttgcattttctaaaagattcatgatattgaacatcttttcatgtacttattgacaatttatgtatcttctctggacatgtgtgtttaagaactttgcccatttctttcattggattatttggggtttttttgttgttgttgttatagagttgtagaagtttcttatataatctggatattaaccctttatcagatatataacttgcaattttcctccattctgcaggctaccttttcactctgttgattgtttcttttgatgcacagaagtttttgagtttgatataatcccatttgtctatttttctttccattatctgtgcttttgttgtgatagccaagaaataattgccaaatctaatgttctgaaggttttcctttatattttcttctaggattttaacagttttaggtcttacatttaggcctttaatccatttttatttaatttttgtatacaatgtaaggtaagggtctaactttattcttttgcatatggatatccagttttcccattaccattttttgaagagactgtcctttcctcattgtgtaatcttggcactcttgtcaaaatcatttggttatatatgcaggggtttatttctgggttctgtgttatattggttatatgtctatatgccagtaccacgtcatgttaattactgctgcttttgaagtatgttttgaaattagggagtgtgaggcatctgagattgcatacaaattttagaatttttttttcctatttctgaaaaaaagtcattgggattttgatagtgattgcattgaatctgtaaatcactttgtgtagcatggaaattttaacattattaagtcttcaaacccctgagtacaggatgagttcccatttatttgtatcttcttagatttcttcttttattaataacaatgttttgtagttttcaatgtaaaaatatttcagttatttgattaagttctttcctcagtattttaccctttttgatgctatagtaaatgaaattttcttttcacgttggtgattgctagtatatagagatgcaactgattttttagtgctaactttgtatcttgcaactttgctgagttattagttgtagcttttttgtgtacgtgggatctttctacatataagaccaagtcatctgcaaatggagaaaattttaattcttctttccaatttggatgtctttttaaaaactttctgattgacctggctagaatatccagtactatgtcaaatagtagtggtaagttgggcatccttgccttgttcctgatcttagagtaaaagctttcagtatttctccattgaatatgatattaactgtgggcttttcatatatggctgtcattatatttaggtactttcctttcatttctagttaagtggttttttttttttaatcatgaaaggccctttattttgttatgtggtgtattacattgattgatttttatatgttgaattataccaggtataaatcttgcctgatcatgacctgtgattcttttagtgtgctgttaaatttagtttgctagtgttttgtttaggatttttgcatcaatatttatcagagatattggtctacagtttattttcttgtgtgtctttgcttttggtatcaggttaatgatgacttatagaatgagtttgagagtgttccttcctcttcacttctttggaagaatttaagaagaatttgtatgttaattcttctttaaatatttggtagaattctgcagtgaatccatcaggtcctagagttttctttcttaggaggcttttgatgactacgtccaatgcctcactagttatacacctgttcagttgttttcttaaaatttcttcatgattaagtcttgataggttgcatattcctagtttatccatttcttctaggttatccaatctgttggtgtattcttcttcatagtaatctcttatactttttttatttctgtgacatcagtcataatgtctcctctttcatttctaattttaaatatttgagtcttctctttttcttaatctagctaagaaattaattttaattatttttactaattaatttgtcaattgtgttaatcttttcaaaacagactcttaattttctttttaaaagttattttcttctctctattttctactctaatctttactattttattccttccgctgacttttggtttgcttgttcttcttttcctatttccttaaagtataagcttaggttgttgatttgagatatttcttgtttttaaaggtaagtgtttaccaatataaatgtccctatttggattgctttcactgcatctcataagttttgaaatgttgtatctctgtttttatttgtctcctgatgttttctaaattcctttatgatttattttttggcccattggttgtttaagcatgcattgtttaatttccacatatttgtggaatttcttgttttccttctactattaatttgtagttttattccagtatagttagagaagatactttgtataatttcagtcttcctaaatttattaagacttgtaatatagcctaacatggtctatcttggagaatgtttcatgcacacttgagaagaatgtgcattttactgtcgttaggtgaagtgttctgtatgtatctgttagatccagttggtctttagtgttgttcaagtcctccgtttcctcattgatcttctgtctagttctatccataattgaaagtgggatattaaagtatcctactattattgtgttgctgtttattccccattcagttctgtcaatgtttgttttatatatttgggcactctaatgttaggtgcatatatatttacgtagccctctgtatctgcaggttctgcatccacagattcaactaatcttggatcaaaaatatttgaaaagaatgaaccgttgcatttgtactgaatatgtaccaacttttttgggtgattattccctaaacaatacaatataatgactatttgcatggtattgacataatattaggaattataaatagcccagagatgatttaaagtatatgagaggatgtgcataggttatatgcaaatattgtgccattttatgtaagggacttgagtatccatggattttggtatccacagagtgtcctggaactaatcccctgtgaatactgaggaacaactgtcattgttgtatcttcctagtgagttgaacttttaatcattatatgatatccttctttgtctcttgtgacagtttttgtcttaagtctattttgtctgatataaatgtcaatctaaatagaagagacagagtctctctaaaataaaattacatttattcaggaatgagcatttcaatgggaatacagtgggtatattcagggaggtaaatgaagacaagagttttataaggaaaaatgaaaagggccacataagttgttttgaaacaatttttcttgaccacagggttcagtaacaacggtggtatcagtccaaggttggacagccagttgctgggtagatgtcttcatggaagtagttttgtttgtgtaaggtcatgacatttgagcaacaatggaggtttggagggagtggctcttaggctaggtctacctggagtccgttgttaagttcaattttgtttgttctgtaggtgtgggctattatttcaaagctgtaggccagcattattgtgttaggagttgtacttccacagaaatttgacaggcaacaggtacaaagtttaaaaagaaagatacgaagtaaaatttatactaatatgatcatcccagtttgcataatggtttcgagccatgaacctgggcttaaaggcaagcaactgaatcaatcaaatgatcattgggaattaggtgagacctaatgtaactatgtgcgtgttttcttattttgtgtatttgggtctcaacttccccagaggaatttatccaggtatgcatgtagtcctagcaatagcatagacactaccttatttaaccagtagataatatagaaaaattttgtcatctgatatctcatgactgggttgaattaaaagcatagagtgagtgacagttgtattaggaatatttttaaagttggactaaaggattctttggtcatgtaaagatctacagttggcataacagatctaacattttgtcaagttgtccacataagctactaattgtaaaattttaactacaccattatcctgcccagtgaaaaagttaagcataggcaaggacaaactaagaggggcaacagtctcattatgataaagattgttctggcatcttgagaaagctgtccacagcataaagacatcaacttctcatcctggtttgtagtttgaatgtctctcgttatagcatcgggtggtttggtgaactttctgcatgacccacaaatcaggcatgaggcttgtctcttaaaatttacatcaagttttctagcttcagcttacagggctttaggaaagagtagttcccattcttagtaataacatgggagaaaattagattagggaacctagaataacttaggatccagtctggtctacagtagataataaaaactcaaagacaatgcacagaactacaatctaataacagatgtattatagtccttttctagaaacataattttgtctctatatagttatcctaatttctaccaaagataattacagtaagactgatttgtttgtaaataagtttagttttattattattttaggttcttgtattattttattagttttattattttagttttttaaagtttatttattacttaataatttacataagagcagcaagagtagtaaattgagcacaaaagaatctcagattttattttattttatttttttgaggcggagtctcgctgtgtcgcccaggctggagtacagtggcgcgatctcggctcactgcaagctccgcctcccgggttcctgccattctcctacctcagcctcccgagtagctgggactacaggcgcccgccaccacgcctggctaattttctttgtatttttagtagagatggg[135 bp omitted]tctagaaagccaaacaaaggcagacttcagactttgtttgcagtaccaataaaaatttaaatatggcattccagttttaattggtaatacaaccaatgtttttaactgtatcatgttacaaggaggtacagattcatactgaatgtatgcaaataattatattgtcatttaagaaacactagcaaatcacttccaaattttgaagggatcaaatagaaaaaaataaatatttccacctttgttcacagaagtatattttaccaaattgttgtaaactatagatagcttaagagaaaatgtttccttaaacttggaagacaaaacatttcagtaaaaaaccaacaatgtttaaattaaaagttataaaaacattatcagttattcaatttcatgtaattagtttttgttatgcttgatcttgattagcagtttcacaaattcatcagtttcttcactgcagttgtgaaaagttttatttagttcattaatcttgaagttattagaaacttgtatttaagagtacttattagagtcttttccatgaatctgattgcagatacctttagagaaaaatcaaaactatggatgtcaaagacttagaataaccatcattaaaaatctgatgggagttcagcagttgagaaggaaattcaattatttctattgtatttagcattttaaggtaacaaccagaatcgtggttgatagcattacatcaggaccatcagacctttttaaatttcacataatatttaatatacatcaataacatatccatgtaacttaaagaaaatatagcatcactttattatttgacattgattcccatacaattaatcaaataagccaaattagtttaacatctctacaagatgatacctcctttaaggttctccaggggcccaactggaaaatctctcagttaattataggtcaaaaagacttaatttagaactttgatcctggagagacctgccaaaaatgtcaaaatggttaaaacatttaattaaaacagaatcacagattattgtggaataatagtcattcacttaatcagagtgaaaagagattccaaaagcaaatacagaacattacatggattaaaaaaaaaaaccttaattctttcaaagctcctaagtaatgaaaaacctaataaagacaacatgaagcatgagaaattattttgataaaacaaaaaatctttgtttcctaggccagctatcaaaagataaaaaccttctacatatttaaaaaccccttgtgattgcttctccctatgggaaacccatttcaataacctggaagttgagcctgatgaaaaggtacttgaattcaactaaacactggaagagtgtgtatccaaggttatgagtgtaccatattatagaaaagataaacaagaaaacaagtaccttgagcaggcggatatgtggctcttagaaaaagtaaaagaatgtggaatttattggttaaacagcaattcagacacatcaagaaaagacaaaattacagaatcaaattatactggaagaaaatattattcccctagattctcctaggccttaaagacaaacatttttagtgttaggccacaatagcagagtcagaactggagagagagccagagagagagcgagcgagagagcgagagaagcaagaggagtgagaggtgagagagggagagagttacaggagctgactccaaagttgagggagagggttatcatccctaaggagacaaggaagagctgaaggcaatgatgcatgattttagtcgttcacttaatcagagtgaaaaaagcttccaaaaacaaatgcagaactttacgtagatgtaaaaaaaacaaaccttaattctttcaaagcacctaagtaatcaaaaacctaattaaagacaacatgaagcatgtttctcatcaaatcatgtgcaatgagatacagcaaagtggaactgagatatgaatttgaaaagcttcaaaaggaaagttcttttgagaaactaaattactatttttaaatgagggagatagtattttaaagctggaataagggaaattaagtggaaagtgtaaaacaggaaaaagctgcagttcagaagacggctgaaaatttaaacggatttcagaatatcaaaacctcttgcagattttttttaactaaaatcacataaatacatcaagaaaaccttgttgctttaaacataggtgaatggattctggttttgtatcactgtattaatactcaatttttgataaaacctgtgaataattcccttttaactataggcaacttgattaaacacaaattttttccataagattcatcttatataaaaagaaaattgtctgacaaatatatccaggcaaaatgtatgcttgcaattctgaagacctcactattttaacaacaattttaaaatcagtttatttaccaaagatttacctaagtcacacaaatttttaaaagttgggtttattactatttttagtaaatagttatttactattttttctgataaattgcttaattttttttctttacatcagtttcataaagttcttttatatatttctgtagaagaatattatgtatgtataacacagaccaagaaacatacagaaacacaaaaagatcttatagcttatcactgtaaaattgtagtcaagaaactgtaaaatatactaatataaaatcacaagtgtataaaaaaagacagttggatccaaattatatttctgaaaaaatgggacaagttaagatcagtttttcatattgctaatcttttttttttcttttgcctttgataggtaatcttatgagggaagtggaccaaattttgggtaaagctgtttttatagcattttagtttttgaaaaatcttttacccttttttcctcttcaattttaaatgagttgttttaattaacttctggatatttacatttcagttaggattggctagaaaaataaacttccaagaatccttgaacttattaacaaatttaatacaagcaaacaagttagcagattcagagcgagcagagaaaaaaagagagctagcttagaagcccgtacatgttaatcctacagttccagtctcttaattcagctctaaggaaacaagcttagagagtttaaataattcccataatggccgtacattatccttagtgtaatttgccaattattttttaaatgtgcatgagaaaggaccataaatttcaaatgtatagctgcctcaagtgccagagggcttggcattctttagaagttgaagatcccattgcatttcttatcaatctctcaagagcaaagaaaagcccaaaaattttgtcaaaagcattgaccaagctgttttgttttaactagtgtacctgacacagaattcatctttttatacttggcagatggcctttgtcctagttgtctaacctatgaccaagttttccctggttgtgtagaaattttcttgagactggcaggtgcctcagtggtaatcttccttgtctgtgactattttatccttacatgggagacgttttctttggagactggagtccgtcatagatggcagtgacgttcctagtggcatttattattattcttattttgttgttactgttgttgtttagatacaaggtctcactctgttgcccaggctggagtgcagtggtacaatcacagctcactacagcgttgaactcctgggcaaagtgatcctgttatcgcagcctcctgagtagctggggagacacgcgtgcatcaccacatctggctaatttctaaagaaatatttttagagacagggtcttgttatgttgcccaggctggtttggaagtcctggtttcatgtatttctctcatctcagcctcccagctggctgggattacaggcacaagccaccatgcctggtcctagtggctttaattgtccactaaaatcagtttatttaccaaagatttacctaagtcatgtgaactttaaaaaaatgtgagttaactactatttttctgataaattacttaagtgcttaatttttttctttaagtcagttaaatagagctctttcatacattttggtagaaaatattacatacatatatagacacaagaacatacagacaacacaaaaagatattttcccttttccctttaaaattttagtcatgatacattaaaacagtaatatactgtgccatttagaatgtttatttttgctctttgaaagtgttcagaaacaagcagggaaaacaaaagagccaaattatttacagttgcatgtaaccaaattgacatgaaaccaaatgaagcgtgctcacaaaaattttaagccaggcttgcagagcaaacaaaatataaaaccgtgtttgcagaaaaaccaaagcaaattcagtagaaaatacatgcctcacagaacgtaagttctgtgggaaccagagtactctccaaaagaacacttggccttataccagaagaggctttccagaaaagacaaaaagtcttttgtagtcccacaagggttgcaaggtccttaatttaaggtggccttatagccaaatccagatcctgaataaagtcaaaagaacttaccaaacgaaggacgtctgagaatctaagcagagattcaccagagcagagaaggaaggccatagaagcagaggccacaaaaggggtcaatgttggtacctcactagattccaggggatgctggcctgtttgaggtcagctgacttcttgacacaaactttatgtcaacctaaatagcagacacagagagaagatgtctaaaagaaaattgtatttattcaggaatgagtattgcaatgggaatatagtgggtgtattcagggaggtaaagaaagacaagggcttttaaagaagtgaggagggttacatgagttttttgaaacaattatctttggctacaaggatcactaacaaaggtggtagtagttcaaggttggacagccagttgctgggcagctgtcttaaccaaagtatttttgtatgtgtaaggttgtggtggcctttgtgcaaggttgttgtgatttttgcagtctttgtgatcgttcctcttatcaggtatatgtgcatgagaaccttcttttcatcaccttccctggctccatttgtcctgctacggtgacaccagtcttttagtccatacatttgacttcatgaggagtttgctataatcaattgaatgaagaagaaacatgtggacctgctttataggtaattctgcataatgttctagcatcacctaaaaccggacagctggcacactacagcctcaggctgtggtggccccaaaggagagtggtaaaagaaaatattcccatttgttagaattttgagtagtgtacttcatagtttttttttttcccagaaggaatgatgccagggggatgaatagttttgctggatggtcatggacttcaaagaagcatgattgataattggttgacaaggcaaattgacaatgaggtatgtgagtggactacttttaatgagcagaatataaaattacttgcggcctatttaattgtcaataatcagcaacctcaccagaagatgagcttaataatcaggtgatcaagatggtacattctgtgaatattcttcaagatttttctctagtcaaccatgtccattcccagtgggtgcatgaacagtgtagtcatggtggaagaaatggagcttattagttcagtactatgaaattccatttactaaatccaatctggctacaaccacatttatatggccaagctatcaaaagtatggactaacactggacctcagataggcactgttcttcaaaggggactaccaacctcctgctggaatttgattacaccggaccactttgatcatggaggagacagcactttgttttcagtggaaaagacaattactctagatatgaatttgcctttcctattccaatgtttctgataaaagcatcacatgtggactttacaaaatgttttattttctgccatggaattccacccagcatttcttgtgaccagggcagtcatttttcaaaaaatgaattgtatccattgggctcatgttgatagaattcactaaacttaccatgattcctgttaacagttccatttcagtagtgggacatgcctcaattctcagaagtcctaccatctctgatttgtcttcccatgtttgtttacctaattcctactttaaaatgtccttgtccctaaaatcctagtgattctgcttctctgattgaaccctgactgatattgaaccatttctgctccttttcagacactacccctctctctcaactataatcactttcctaacttctatcaccattgactacttttccttttatctttatatatatgaaaccatattgtatatatccttttgtgtctctgttttgcccaacattatgtttgtgagattgaactatgctgctgttttatagcaattgtttacttattttgttactgtagagcaagtgtaggcacactacatcccatgggtgaaatcttgtatatatttcggggtgcacatgtgtgtgtgtttctgcttgctagaagtggaatttctgtgtcatggagaatacataaatttaactctagcagatactgtgaaacattttccaaagtgattgtaccaatttacactcttacaaggaccgtggtagagttccatctgctccacgtgcttgccaatgtttggtgttgtcagacttaaattatttttaaattattttttaaattcaccattctaattttttaaaagaagtagagtataatgctggttaccaggggctggagtggaggggttgggacatattggtcaaaagatataacatgtcagttatacacgagtaatttttaaaaaatcagtgattctggtatggcaatagagttgtctcattgagggtttaatttatactgctgtaatgactaatgaagttgagcaaacagagcatgtatctgaagccttgtacatttgtatattcttcatatagtgcttactcaagtgatttgttgatttgtctatttggttgtcagtcttattcttgtatttataggatttctttatattctgcttacaagccttttgacatatgtgtgtattgtgattatcttttcaactgtggccagcattttcactttccttatggtacatttgataaacaaccattctcattttaagttttttaattttacttttcagttggtactttaaaaaatcgttgccaacattagagaaggtcacaaagatattttagtagctatttaaaaaaatcttttaattttaagatctatattccatatcatattgatatttacatatgggatgtgctaaaggtcaagattaattatttttctatgtgaagaatatacaatatcctcacttcttaagagatttctccattttattatctttgtcaaatatcaaatgactagatatatgtaaatctgtttctgaactttctattatcttccattagtctattcatatttgcatatatagcacacttttaattactgcaaatacataaaatgtcttgatgtcttatcgcataaacccacctctttctattttcttttgatgttttggttattcttgactgttgcttttgtttacagattttagactcagcttgccagttttcaccaaaaaactgctgagaattttattaaatatatagattattcaaaggagcactgatagctttacaacattgaattgtccagtatctgaatagcaccacatattttaaattttcattgaagtataaatatatgtagaaaaatgtatatgtcatatgtgtcatgattgtttaattttcaacacactcaaaataccagcatctgtatcaagaaactgcacataaccagcatgtggtagccatgaaaatgtatttcacaaatattttaatgcaagtaaccaaagacccctattgttgtgttttaaggtcaatcctgtgtttgcatcaaggccagattttctgaaggctgctgctcccagtcaatatctgagagcagtaaggattctaaggtagacctgttcagggagacatggatcttctctgttggatagataagattgtgaatacctgactttaatggctttttctttaatataacttttctttcttttttttgaaatttagtctcgctctgttatacaggctggagtgcagtggtgcgatctcggctcactgcaacctccacctccagggttcaaaggattctcctgcctcagtctcccaaatagctgggattacagacatgccaccacacccagctaatctttgtatttttagtagagacggtgtttcaccatgttggccaggtgggtcttgaactcctgacctcaggtgatccgcccgccttggcttcccaaagtgctgggttacaggtgtaagccactgcacctggcctaatgtaacttttcttaagctgtatggaagtctagaatgattttatcaaatcttcctttgttgttgtgttgttgttgctgttgttgttgttgagacagggtctcactctgtcacccaggctgaagtgcagtggcacaatcttggctcactgcaacctctgcctccccggctcaagtgatcctccagcctctgcctcccaagtagcagggactacaggcacgtgccaccacacccagttagtttttgtatttttttgtagagacagagtctcactttgttccctgggctgccttttgttctttactcagtgttagatttacatcatggtgcagcttctctcctgttttctctcacaatcatttcccctaataaaattcttacacaactaattctgcctttgcattttttttctttctttcctttttatttttcttatttatttatttttttgagacagagtctcactcttgttgcccaggctggagtgcactggcgagatcttggctcactgcaaactccgtctcctgtgttcaagtgattctcctgcctctgcctcctgagtatctgggattacaggcatgggccaccatgcccggctaattttgtattttttgtagagatgggtttctccatgttggtcaggctggtttcgaaccccgaactcaggtgatcctgcccaccttggcctcccaaagtgctcggattacaggcatgagccacttcgcctggctgcatttttatttctaagaggacctgcattagcacatcaccctaaaaacgttcgtgcccaattcaaattcctacttttctctcaaggtaggcactgttctgatttataatagcatagatttgctttgctattttttatacttcatataaatagaaaaaatatgtacaattttgtgttttatttgtccacattatgtccgtgacatttatccatgctgttggaagtgaatataactggtttactctcattaatatgtattattttaatgtataaatatcacataacttattaattcatttaatcgttgattttgtgtagtttcttgtccttggttattaaaatcagtgcttgtaggctgggtgtggtggctcacacctgtaattccagagctttgggaggctgagatgggcggatcacaagttcaggagttctggatcatcctggccaacatggtgaaaccctgtctctactaaaaatacaaaaattagcttgacttggtggcatgtgcctataatcccagctactcaggaggctgaggcaggagaattgcttgaacccgggagacagaagttgcagggagctgagattgcagcactgcactctagcctgggtgacagggcaaggtttcatctcaaaaaaaaaacataaataaaaaatgaataaaataaaattagtgtttgtataaacataaaaagacatgtcttttgctgaacatatgaatctccttctattgataatatatatataagcatggatctaagggttatacgacagttttagtaatagcactgaaagttttagtggtagcactaaaactactcagcttcagtaattactgcaaaactttattgcaaagtggttgtataaaactacattcctacacgatgcaagtatttgcatttttgtcaacctttctttgactaattcttaattttaacctttatggttggaatgtagtggagttctcataatattttgagtttctttgatgactcaagaacttgagtatctttttatttgattattgagtatttatgtcatcttttctgaactatctgttcagttatttttacatttttctgatttgtttgcctgacttttcttacagattttaggatttacgtattcttatatgctcaggatatgaatcttttgtcacatatatggtttacaaattttctcaatttgagaattaccttttcattttctcattggtgccttaattaagagaagttcttcatttttaaaataatctaagtcacctaattttttaaaaattgtggattattttggtctcatataatatttttttccacttcagggcaacaaacaggttcttttgtttccctaagtgtcattgctttactttccaaaattagatctgcattttttctgaaagttatatttgtgaattctgtgaagtacagacgaatatatattttcccatgtggatatctaattgatgaagaagcacatattaaaaagaatttttataatctgtacagtagcatattcttttcacaaatgaaatgacagtatttactttgatctacactctattctcttcctttatctatatatctttaagcaaatgccacactgatattgtagctttataatatgattagatatctcataaagtaagtcttccattttgttattctttcacattatcttgactattcttagctctcagattttactccaaatttttataatatttgtatcaatttccagaaaaaattctagtatttttattgggtttgcattgatatgatggattactttggtgaagaatattgagatgtttaaaatattaaattgtctatccataaatattatttattataattattttaaaggttttttgtatatgcaggaaaataaaagcagatctttacctaataatatttacatagatttcaaaaggattaaagggcctaaatgggaaaggtaaatgtagaaagttaatttttttaatgtaggagaatattcttgaaacctaggactttcaaaagcacagaaattaaggaaaatgcttattaaatttctctcctcaaaattaaggatgcttattcaatgtgagacacagtatatgaatattaaaatcaagtacaggtgccaagacaattcaatgaaaaaagaacagtctgttcaacaaatagcaaatagtgctaagaaaactggatgtgcacatgaaaaagaatgaagttggaccccctactttacatcatatacaaaaattaacttatagtgggtaaaaggcctaaatgtaacagctaaaactataaacaactagatgaaatcatagatataaatcttcatgaccttgaaataggcaatggtttcttagatatgacatcaaaagcacaaggaacaacaaaaaataaatgaatgaattggaactcatcaaaatgaaaaacttttgtgtatcagtggataccatcgagaaagtgaagacaccaacatgggtgaacgtatttgtaaatcatatatctgatgagacttgtagctagaatacataaataactcttacaattcaacactttagaaagacaaataacccaattaaacaatgggccaaagtatctgaatagacatttttcaaaagaagacatataaatgcccaataggcacatgaaaagatggtcaatgtcataagtcattagggaaacggaaatcaaaacaacaatgagatattgcttagccaccagattggctacagtaaaaaagacagataataaaagggttgccaagggagtggagaaattggaaccctcatacattgttggtgggaatgtaaaatggtgcaatttatttggcaaacagtctggcagtttcccaagggtttaaacatagagttattatatgactcagcattccactcctagatatacaaccaagagaaattaaaacttatgcctacacataagcttgtacataaatgttcaaaacaacattattaataatagccaaaagtagaaacaatccaaaatagccattaatgaataaataagatgtgatgtattcatccaatggcacattatgtagccatgaaaagaaatgaataactggttcatgcaccaacatggatgacccttcaacatgttatgctaagtaaagttcgtttcaaaagaccacgtattgtgtgagtacactgacagaaaatgttcaaaatatgtacatctacagaaagtagattagtgattgcctagggctgaggagtttgggaaaaattggaagtgactgttaatgggtatcaggtatctttttgagattatgtaaatgtcctaaaaattgattgcagtgatagttgcacaactctctggatataataaaattcatttaactgtgctctttaaatgggtaaactgtatccattatatctcaataaagtttctataagaaatatcaaaaaatagctctccctctccctctccctctccctctctccctctcttccctccccctctcccccctccctctcccctccccctctccccctctccctctcccctttgcacggtctccctcccatgccgagctgatacgaggctggactgtactgccgccatctctgctcactgcaacttccctgcctgattctcctgcctcagcctgccgagtgcctgggattgcaggcgtgcgccgccacgcctgactggtttttgtattttttggtggagacggggtttccccctgttggcccccctggtctccagctcctgaccacgagtgatctgccagcctcggcctcccgaggtgctgggattgcagacggagtctcgctcactcagtgctcaatgttgcccaggctggagtgcagtggcgtgatcttggctcgctacaacctccacctcccagccacctgccttggcctcccaaagtgccgagattgcagcctctgcctggccgccaccccatctaggaagtgaggagcgtctctgcctggccgcccattgtctgggatgtgaggagcctctctgcccggctgcccagtctaggaagtgaggagcgcctcttccctgccgtcatcccgtctaggaagtgaggagtgtctctgccgggccgcccatcatctggggtgtggggagcgcctctgccccgccgccccgtctgggatgtgaggagcgcctctgcccggctgcgaccccgtctgggaactgaggagtgtctctgccccgctgccaccctgtctgggaggtgaggagcgtctctgacccgccatcccgtctgagaagtgaggagcccctccgcccggcagccgccccatctgggaagtgaggagcctctccgcccggcagccgccctgtctgggaagtgaggagcatctccgcccggcagccaccccgtccgggaggtggggggcagcccccgcccggccagccaccctgtccgggaggtggggggggcgcctctgccccgccgccccgtctgggaagtgaggagcccctctgcccggccgccaccccgtctgggaggtgtacccaacagctcattgagaacgggccatgatgacgatggcggttttgttgaatagaaaggggggaagtgtggggaaaagaaagagagatcgggttgttactgtgtctgtgtggaaagaagtagacataggagactccattttgttctgtactaagaaaaattcttctgccttgggatgctgttaatctataaccttgcccccaaccccctgctctctgaaacatgtgctgtgtccactaagggttaaatggattaagggcagtgcaagatgtgctttgtgaaacagatgcttgaaggcagcatgctcgttaagagtcatcaccactccctaatctcaagtacccagggacacaaacactgcggaaggcggcagggccctctgcctaggaaaaccagagacctttgttcacatgtttatctgctgaccttccctccactattgtcctatgaccctgccaaatccccctctcggagaaacacccaagaatgatcaataaatactaaaaaaaaataaaaataaaaataaataaattaaaaaaatttaataaaaaacaatcaatacatcaaaaaaagaaatatcaaaaaataccaaatagtaggtattgctgtgtctcaaatgcataaggtattaatattcgtggtatataatccaagtgaacaaggaaaatatagcacccataacagaagaaaagggcataaatatacagtttacagaataggctgtaaagtattttgaagaaatgctcaaacttattaaaaatcagagaaatttgattaaaacagtgaaataccagtatgtgtttaatggagtggcaagacataggatgatggttcatggcaaatgatggtatggaaatgggtggttatacaacaaactgtattcagtgctcatgagaatgtggaatggtttaaccattcaggagagcaatatagctattaatattatttgtaaatgtgtaagtatatgactctgctatgaaccaacaactacacttatggatatgtgtcctaaataaattgtcacacatttctatgaagatgtatagtgatgttcctagcattgttattgccaatggcaatccaggtttctgtcatggaatagtaaaatattttgggtgtaaacaattagttctataaaataggttaatgtatgctagaaacatggatgaatctttaaaacatactgctgagttttgaaagtcttaacatttatttttatgacataataccacttatataaactaaaagtgtgcacacacaaccacatcacatgcactttgcacaaaacacacacaaagagaaacacaacaaacaaaatatggggctgggggaggaaatgaaagtgttccatagggaaaagaaaggaataaataaataataaaattattttgaccaagttgctagatataagcttcagtacaatttgattagaagtggtgatattcagcattttcttcccattctcattctcagagataaattttcaacattttgttaattgttgtgtatgttcattttagttttaagtgggaatttatatttcttaaatgtatcatcataatgttcctcataatattctcaatatatttagtgatgttcccttttacttctgaaactggtaatatgtcatttctgtcttttttgtttactgtcactggactttgtcagttttattgttctatttatagaatgatcattttactttttaagatccactccatttcgttttctatttcatgtatttcctattatcttgatcatttctttccatctacccactgtggttttggtatttgtttattgaattcctgagataaatgtttttatttttttgttcagcttttctcctgttttaggacagatgctcctcaacttacagtgggctcacattctgatgaacttacctaccgtaagttgaaagtatcctaagtcgaaaatgcatttaatacacccaatctaccaaacatcatagcttaggctagcctgccttaaaggtgctcatgacgtttatattagcccccagttgggcaaggttttttgttttgttttgttttgagagggagtctcgctctctcgcccaggctggagtgcaatggctcgatcttggctcactgcaaccgccgcctcgcaggttcaggtgattctcttgcctcagcctccagagtagctgggactacaggtgcgcaccaccacgcccgactaattttcatagttttagtagagacagggttttgccatattctccagggtggtctcaaactcctgacctcaggtgatccaagggcaacgttatctagcaaaaagaagcttatttcataataaagtgttgaatatcatataatttattgaataggtattgaaagggaaaaacagaagggttgtataggtactgtactgaatgtgtgttgctttcacaccatcatgaagtcgaaaaatcttaagtgaaccattgttaactccaggacctgtatatgatttcaaggctttctatgtttccttctaatcatgtattaaaagctctcctgtttatcagtgtttttctccttatgagtctgtcaatcaatttttctttataaagtttgctttacattatgtaaggctgttatagttgatagaaaattttcattactatgaagtgtttctttgtatatcttaaaatgttcttttcttcaaggactattgtactttgtccaatattaatatattttaaaattagagaaagaatatgaggcctaggacgatagtctctttctccattagaatatttttgtttatgtcaggtacctgcaaacactaacagaaaaggtttactttaatctattttcaggtacgaatgtgatttcaagttttgcttcagtcccctagtgaagatgatctatttgccctttatctttactcctgtagtgcagctctttgggttttactaggtacccttctcccgatccccaacttcttccccaaggcccttgaacaacagaatcggtaggtaccaccaagacagacacttccactctaaaattgcaaatcttggctaagatttgctctggctttctaggatacccggaagctcaggttactcggaagtatttccgctccaaggagcggaactatggccggtttcccctggggcattctgggaagtgtagtcaggggcccgcgtagcctggggcacttccgcttttggatggcggagctagggaattgtgggaagtgatccggggtttctctttagttgctgggaagttttttcgctctaggagggcgaaaacaagtgtttggatccgctgggaccctccaagttttctcagcctcgtcagggagcaagcggggccctggccctcgtctggaggaaggctagagaagctgtggccagctgggaggctggagttgggagcagtttgtgttctttcctctcggctgagcctcacgtttggagcagttcttgcgtccccgggttgggagcgtcctggatcggttgtcgcttggttagagggtctcctggcgttccgcagccagcctctcccacctacttgccagctctgccacttactagtgttataacgttttgtgagttaatcttaatctttctctatcccattctcctcattcctgaagtagagtcattagtaggaggtccttgtacttttatacgaattattcattaaatgtccaaaataccgttatgtggtaggtaccacttatgttctaacagagagacgaagataatagacctctccacacaatgtagaaaagaaagctgtcttattactgaataaggacaaccactgtatagtattgtaggcaatctaaagaaaaatattattaaaaaattccgccctatgtgtacagtcaagcagttttaaactttttatacaattctacttttgaccactatgtacatcagttctcaagattaatgatttttcaataagaggacttggtctcatcatttactgcaaattcttttataaatttattctaaatttacttgagaatccagtgttagttaactaactttatcgaaagtaataaaacttctcttacctcatctgctagccgatttacagtttaaagagaggcaccttggttaaactcttgcagtgatagggacagtgggttgttattttctcagatgtttatattcaaaagggacaaatctcagaactttcacaaatacttctaggttgtaaacctggctagaggcttacatagccgctaatgaaatttacatgcgtatcaaaaggttagagaaaggattcagaagcactaggtttcttatggaaatgctctaagaaaaagaagagggaagacgaaccctaaaacgtacagttagtaagaggcagaacgtccatatgaacccaagaagttggagcctcaagtctgtgttcatattctccacgctgtacatttttcttagaaccatatgaaataatcgtgtatatggtttgtggaagtctttttctatcaggtttggaaggtgatctggggctttagagtctatattctccttatagaaataatgcatgaccattatagagagattagaaaatacagaaatgtataaaaggaaatgaaagttacccatattcactgctgtatatttaaacaattagctgggtgtggtggcacataccgatagtcccagctacttgggaggctgaggtgggaggatcgcttgagctcaggagtttgaagctgcagtgagctatgaccacggcactgcactccagcttggatgacagcgagaccccgttcctttaacccataatctcaggatttagagataaccactgctaacattttaaatgcatttatgcattggtgccataccacccacatggtatttctctaatttttcttgtagaaattcccaaacatgcacatacagaaaatagtgttaatgacccccaccccgccatcatttgtctttaactcttgtaaacattttgtctatcttattgcatctattactcttctcccacatatgtttttggtgggaagaggaggaatttgactatttaaaatcaaaaccaaatcctagtcagtcggtagaaattaaaagtaattaacataaagtaattatgaatgaagagcaaaggaaagcaaataacttcagggttttctttcctggcaactaggaggaaggtagttatgtgaaaaacctaaaggagagggaatcattgagatttggaaaggaatagttatgaatttggcttctttatttggaatgttttactcagggtc[364 bp omitted]gctgcatgttactttgttgcaggaactatgtcccattctttaccatgtgcttagcacccagcacaagactggtaaggaggggtttagtgtttgtggtttgtggagctgcccagtatcttgaaatggaaacctgcagatcatttagattgtattcagaattcccaaaatggatttaggaaaaaataaaaggaaataatgtcaatattagtgactctttatctcacttttggtgggatgcatttgcatagtcttctagtttttttcccagtaatcaaaagttgatgcatggttattgataatattttagtgatcaaagcaaatttttgtagaaaccttccatccataatttatgtgtcctgtgtttatcccctgaggttaacatttgctaactttttatagggtagtcatgaatcaggcagaatttccagtgttttacatgtatttattcatttgtacttgatatcaaccctattatagtctccattttacaaatgaagaaaaaggggacagaagaaatggaagcactagtattttaatctagatagctttatactaaggctgtaatattagctactacacactacttttattagtctacaaggcaagaacccacagtaagtcttattagagcagggaatatttaagctatggatgaagaccgtcacccaggagggaaaagagtagcaggttatgacagaaggaacaccaaatacaaagaattagaggctttttgtaggagtacaagtaatccactatggctggacatgtagagtggaaagtggattccaagagagaaacagcatctggaaaattcctgtttgtgcgacttgttaaagcatttgaaccttctcttaagggcactggatagacatgcaggtgaaaataatcaaatttccatcttaggagatatacttaacctctctctgcctctggatcccaaagagtaaactagaggacattatttgttttaaaaaagttgtgaaaatgggctaagtgtggtggctcatgcctgtaatcctagcactttgggaggccggggcgggtggatcacctgaggtcaggaattcaagactagcctggccaagatggcaaaaccccgtctctactaaaaatacaaaaattagctgggcgtggtggggaggggggtgcctataaccccagcgacttgggaggctgaggcaggagacttgcttgaaccttgtgtgagggcggaggttgcaatgagccgaggtcatgccacttcactccagcctgggcaaaagagccaaactctgtctaacaacaacaacaacaacaacaacaacaaaacagaacaaaaaaaaaaagaaaaaagttgtgaaaatgtagtgagggtcccatagtctgaatagtttgaactagttcctggcacatacttggttctttataagagatagttgtatataacagaataaagaatatatatttagtaaatgagaactgcaaacatgtactgtagtagatatgtggatatttttaggtattgctctcttctttcaaccctcaattcttggaaacatcaattccattatacatttaagcaaataaagatcaaggtttaaacactgaagtaataaatttgttcatctttcaaattcagaaactccttgaggaatgattacagaggccctagttgctttgtggagttgatctaccatatgccaaagcttgtgttttctatgtctagctatcctcagtaagcaagttgttctgaattatatgactgtgctattaagaaaagtggaaatccataatatattctgccttcgttgcattttttgattgctctttcattcttttagtatctaaagagtagtttttctattagtcgatcctgttaaatgtaaaaacttaaagggtttcctctgccctttttttttttttttttggaagtggtgggtataattctattagtacaggatcacgtgatctgtttcttataatagttttttttttcttttttttttttttgagacagagtctcactctgtcgcccaggctggagtgcagtggcacgatcttggctcactgcaccctccagggttcaagcgattcttatgcctcagcctcccaagtagctgggactacaggcgcgcgccaccacgcccggctaatttttatatttttagtagagacggggcttcatcatattggccaagctggtctggaactcctgacctcgtgatccgcccgcctcggcctcccaaagtgctgggagtctttttttattttagggctccaattcttcacatatttgctgttactttttgttaataagaaaaacctaaattccactgacatcagagaactgcttcagcctggctaaacagcaataagccgtgaagaggattctggatgttgtagtccgggagctccgagaattttgtcacactctccgtaaccctctctcactcgctcgctccgtttttttttttgtttttttttttttcaagcgcgaagagggcggcacctggatggtttttccttctggaagttctgggaaacgtattccagaactctgtccggaaacaattgggccgcaggagcgcgggccttctgggaagggtagttcaggagctctgggcaggcagagccacttccgccccggaaagcgaggccgccaccatcttttgggtccgggaggtgagtcagccctgcacccccacgacccctcttgaaccttttcagcctgtgcttgggaataggcgctccccagccatcagtcttgggatggagaggtcgcggccgcggcggaggccgagaggccgagggcgggaagtttgctctcctcccgcacttggcaagcagcgccgctagttctgtgggtataataaacagcgagttacctatgatccgcgctcctgtttcctcatctttaaaatagcaataaagatagtcgttactgtgtagggttgtaattagaattaaacaagataatacgggtcaaaccttagaacagtggtggcacctgatactgggttggctcctgctattgatacagtgattccctcacaagcgccctttttactggaagctccagtgaagagagaagaaaagtcagggctttatgccatggcctttctgtcgtatccttcaggagaccgagctcttcccgaacttttacagatcttttttttttttaagaaggattgagtcatcgggctccaatgcgtggggatgtttaccgccgtttatccgggatagagactccatcgtgctgacagcatccttttattcaccgcctccgaatttgcaaagaggaggaaggagggacttcttggcttctcccagcatagccccaggtacctgctcttgaacgcactttgttgttccattttctgtcctttcagttaatcaagtttccgtcactcagtaagttactactgaaaaatgatgaaatatttgttgaataaatgtgagagtgggtaggaaaactacttggaaatgagtattaccaataacatcttaccactttgattttaaggcattcgtctgtggaccatagctattgatgaagtaggtcttgttattttgttatgaggaaattaggcagagtttatgttattaaatactttcccgaagttattcaactgatagtaagaggtggatttgggattgaacccaagcattccttttcagactgtgtgatcttttttgtttgtttttgtttctttggtttttgttgttgtttattttctattcctttttctgagtctgtggtcttaatctcaatgatacagtcgtcttcagttatcttaaatagtaatccatatggctaccggtgagtcgttggaaatcagccttgggaatgtaggtatggattttactgtggaagacctcaaaaactgcactgatgaattttgaattttttagaaaaatcctgcaacatctcacttacttaatttcattccatgtcaaaatatgtcatattctagttatagaagtaatgaatgctcattatagagatgcactatccaatccagtagctataagccatgtgtgccctaggagcacttgaaatgtgtctagtccaaattgagatgtgctgtaagtgttaaatacacactggatttcaaaaactttgtacaaaaaatgtaagatggctcattgataattttttgtattatatgtcaaaatggtaatattttggatacattggcttaaattatgttgttgaaattaacttcacctatttttgtttttgtttttttgccttttttatatgttactgctagaaaatttaaaattatttatgtgtctcagtatatttctattggacagtgatgttatattcagaaaacttaaattacttataataaaactgctaacactttaatgtgtttccctttagtatatgctatggatgtttctcaaaataggtttggtattctgtgtagtagtttttttcttattatgaaaattttcttttttctttttttttctttttttttgtgagatggagattcactcttgttgcccaggctggagtgcagtggcgtgatctcagctcactgcaacctccacctcccaggttcaagtgattctcctgcat[133 bp omitted]tcggcctcccaaagtgctgggattaccggcgtgagccactgcgcccagccgaaaaatttcaagcatattcaactgtcaaaagagtggtgcagtgaattccacgtaaccaacactcaggttcaacatttgctgcagaccatctcctcctccttccaccccacttttttttttttttttaaattagagtgtcttaaagcaggagtcccaacttctgggcagcggacctggtactagtctgtggcctgttaggaacctgacagcacagaaggaggtgattggaggggtaccgcctgagctctgcctcctgccagatcagcaggggcattagattctcataggagggactgcacatgtgaaggatctaggttgtgcgctccttatgagaatgtaactaatgcctcatgatttgaggtggaacctatcatccccaaaccatctcccccgcccccatccgtggaaaaattatcttccgtgaaactggtccctggtgccaaaaaggctgcagatggttgtcttaaagcatacgccagacatcaggtcagttttttttttttttttgaaacggagtctcgcctgtcgcccagaccggagtgcagtggcgccatctcggttcactgcagcctctgcctcccgggttcaagcgattctcctgcctcagcctcccgagtagctgaggtcagttttttttttattttctaccatgacctctgaaactgaagctgtaatttgccatttgctcagtacagtatatcttttttttgttctttttctttcaaacttttttgtcattatgttttcgtagtgtcttttagaatatatatgtataatttttttttttttagtgcagtctgggataatttgcttttactatctgtgtgtatattttgttctcctttcttgtctttttttgttcagtttattcccttttatttgtgctcaactggtctggagtttatatggttttgtgtcattcttctaactttaaaaatattctctttcttagcaaatactaaacttaatcagcatgtgttcttattctgaagaatattgagactaaaaaaaatctgaaagaagatggggccaggtgcggtggctcatgcctgtaatcccagcacttggggaggcctaggcgggtggatcacctgaagtcaggagtttgagaccagcctggccagcatgatgaaaccccgtctgtactaaaaacacaaaaattagccagacgtggtggtgcgtacctgtaatcccagctactcaggaggctgaggtgggagaatcgcttgaacctgggaggcagaggttgcagtgagctgagattgtgccattgcactccagcctgggtgacaagagcgaaactctctctctaaaaaaaaaaaaaaaaaaaaagatgtacctttaaaaaaaaaaaaaaaaaagctatgtttttataggtctactttttattataaccaccctcaaaatttgtcattatagttctttggctttttttaaacaaagattattatattaccaatatagtcacaaatgttttcttaccattgctttttgcagtccatcttttagggttcacatggttataaattctcttcattttttttttcagctaaaatattgtttctttctcatgtaaataatcatctagttgaacatagaattcaggttgacagtttctttattttggaggtaatattcatttgttttaaatctccattctgttaccctatttctgtcaatctaattgttatttcttttaggtcaactatattttctttctaggagctttaaggttgttgtttccagttctttatgttcgtttagtcttttgcatttctgagttttattgtgatttgtttagggtatgtttatttttatttatactgtttagaatttctatatgcgaacttgtatcttttaccaattgtgtgaaattctcagcaattgcatcttgaaattaaaacctctcagtcattccctccatcctgccttctcttctcccattcctgttagacaaatacggaagcctctcaatttatctttcatgtttcttgatttttcgtttgtgctttatctttctctttgctgtgtgtttttctctgtgcacataaaataaaagagatgtaccaatgatcgtttccaggcttcatgaagtaaattgacccagaatgatacgttttagaaaactgataacagtgtcagtaaaatattactagctgggcaacaaattactaaaaagaaaccttaagtcagatttcggcttttcagaaattaaaggtgactttcatag[135 bp omitted]cctccaccttccaggttctagcaattctcatgcctcagcctcccaagtagctgggattacagacccgcaccaccacgcctggctgattttttttatttttggtagagatgaggttttgccgtgttggccaggctggtctcaaacttctgaccttatgtgatcctccctccttggcctcctaaagtgctgggattacaagcatgagccactgtgccaggcctggctaaacagcaagaagccatgaagaagcttttttgtaactataagagaaagggactcctggttcttagaactctccatctacttatttaatccttggaaaaaccctatgagggaggtacgatttatgattcttaccatatcctcattgtacacataacagaagtgaggcacagagagggtttttaatatccccaaggttacacagctggtaagtatcatttctaggaattaaacccagatacttgacttgagagccctcatatgttgttacattgcctctcgtttcctgctgtctctgccatcagaaatccttgtagcaaggatgctgcacttgtgcagactgttcactgcccaatggcactgaactatcatgccatttagtagctggaatacagtccatgttctgcttaccaagctgtatgtggctatacctgtctgaatgtagggctatttctctaatttcctcatatgtacacatgggctaacagcaggcttgtgtctcatggcgtctttggtctcccccagttatgccatctcagaactatgaccttccccagaagaagcaggagaaaatgaccaagtttcaggtacgtaaaggattccttgctgtcttttaaaatgtgatttatttctcaaagataacagatttattttttctctttcttggaaaggttagtgggaaacagatattcaggacatgtggtatgctgacatgtatgtgtttttttgttttagtttatcacctttactattttacaaaacagtgtttgaaaaaataatagaagctttaatcagaaataatctatgctactaccctgcttatgaactagcttttttcattttcccatgttcctttttcatacacattttgcaatacttgagtagatgaaattttcaattgtgcattctccacttaattgcatcacctgcattgtaagtgagtacatcatatgccattgaattgcagtgcccttaaaagacaacaaaaactatttcttatttagcctttcagaaattcagaaattttaagaattttactactttaaagtaaatccagtgacttttttccctacatataaaaacaattccttcaaaagaaattctggtggaattcaatattatttgtccttaaagttttaggaactctgcattgaagaggtttatgtctcagtttcatgtcagttccctcaggtgttttgtaaacagaacatctaaagaatgacatggtgtaattttattagatgctttcagagaagaagagctatatatttttcccgtttatgtttttatcactcatttatttcttgtatgaatttatttcatcaaagtaactacatgtacgtaaggtctagtagtacttagatgtcttgctagccctttccatctgtcattgcatttttcagatgtgaggatggagatgatttatttgcattttaaatatgaagaaacaggttatgggaacattttataactgccccaaatttcccaggtagctgactcattggacactgaagcttccaactattaggaatatctggcattctattttcatgtaaaggcagacagaacaaaagagttttccattcacagagatgagcacatatgatagaagtacctgatgttacctttttattcttttgagacagagtttaattcttgtcacccaggccggagtgcaatggcatgttcttagctcactgcaacctctgcctcccaggttcaagcgattctcctgcctcagcctcccaagtagctgggattacaggcatgtaccagcacgcctggctaattttgtatttttattagagacggggtttcaccacgttggccaggctggtcttcaactcctgacctcagatgatccacccacttcggcctcccaaagtgctgggattataggcgtgaaccagtgcacctggccctgatattaccttttggaggatagaccccaacaatgcccctcatccagtttccatctcaattactgtctcttctctagttttgtctcttagtcattccatgaacgtagatgctcaagcacagtttttatgtaagtgttttaaatttccctacagcaaaagctatcaggtatgatggtaagagacagcagcaaaccggtggcatatacttaaacattaggtaaaggtctaatagcttaaattcctgttaagattagtaatatagagaaaattccaactggaatatgagcaaaagaaatgaataggagtgtcataaagaaaagaaatttatgaaaaaaacttcactaataatttaaatgtgtgaaaatgttaataaaatagctttctatttatatattggttttacttatattgtcaatgacttttttagaaaaaggaactgagtcctatttagccggggtctagagattcaggaatgcttgtactgttgcatgaagagtgaactgggaaaatctttggagaggaaaatctgccattacgctttcaaaacttttttttttggatgttgattttcttttatttatttatttatttatttatttattattattatactttaagttttagggtacatgtgcacaatgtgcaggtttgttacatatgtatacatgtgccatgttggtgtgctgcacccattaactcgtcatttagcattaggtatatctcctaatgctatccctccccactccccccaccccacaacagtccctggagtgtgatgttccccttcctgtgtccatgtgttctcattgttcaattcccacctatgagtgagaacatgcagcgtttggttttttgtccttgcgatagtttgctgagaatgatggtttccagtttcatccatgtccctacaaaggacatgaactcatccttttttatggctgcatagtattccatggtgtatatgtgccacattttcttaatccatctatcgttgttggacatttgggttggttccaagtctttgctattgtgaatagtgccagaattaacatatgtgtgcatgtgtctttatagcagcatgatttataatcctttgggtatatacccagtaatgggatggctgggtcaaatggtatttctagttctagatccctgaggaattgccacactgacttccacaatggttgaactagtttacagtcccaccaacagtgtaaaagtgttgctatttctccacatcctctccagcacctgttgtttcctttttttttttaactttaaaaaaatgttaatagaaaaaaaatgcccagataaagataccgatcacagtatccacatctatacaatgattgatccagctgtggccctcccctctcacccagccccatgtggcttcctttgaaactgcagactggagatgacagtggtgaattctagtcctactcactggatatcagcatttcttttttttaaaattttattattattaaactaagttttagggtacatgtgcacaatgtgcaggttagttacatatgtatacatgtgccatgctggtgtgctgcacccattaactcgtcatttagcattaggtatatctgctaatgctatccctcccgcctcccccaaccccacaacagtccccagagtgtgatgttccccttcctgtgtccatgtgttctcattgttcagttcccacctatgagtgagaacatgtggtgtttggtttttcgtccttgcgatagtactgagaatgatgatttccaatttcatccatgtccctacaaaggacatgaactcatccttttttatggctgcatagtattccatggtgtatatgtgccacattttcttaatccagtctatcattgttggacatttgggttggttccaagtctttgctattgtgaatagtgctgcaataaacatacgtgtgcatgtgtctttatagcagcatgatttataatccgttgggtatacacccagtagccataaaaaatgatgagttcatgtcctttgtagggacatgaacatacatgtgcatgtgtcttcatagcagcatgatttatagtcctttgggtatatacccagtaatgggatggctgggtcaaatggtatttctagttctagatccctgaggaatcgccacactgacttccacaatggttgaactagtttacagtcgcaccagcagtgtaaaagtgttcctgtttctccacatcctctccagcacctgttgtttcctgactttttaatggttgccattctaactggtgtgagatggtatctcattgtggttttgatttgcatttccctgatggccagtgatggtgagcattttttcatgtggtttttggctgcataaatgttttcttttgagaagtgtctgttcatgtccttcgcccactttttgatggggttgtttgcttttttcttgtaaatttgtttgagttcattgtagattctggatattagccctttgtcagatgagtaggttgcaaaaattttctcccattttgtaggttgcctgtccactctgatggtagtttcttttgctgtgcagaagctctttagtttaattagatcccatttgtcaattttggcttttgttgccattgcttttagtgttttagacatgaagtccttgcccatgcctatgtcctgaatggtaatgcctaggttttcttctagggtttttatggttttaggtctaatgtttaagtctttaatccatcttgaattaatttttgtataaagtgtaaggaagggatccagtttcagctttctacatatggctaaccagttttcccagcatcatttattaaatagggaatcctttccccattgcttgtttttctcaggtttgtcaaagatcagatagttgtagatctgtggcgttatttctgagggctctgttctgttccattgatctatatctctgttttggtaccagtaccatgctgttttggttactgtagccttgtagtatagtttgaagtcaggtagcatgatgcctccagctttgttcttttggcctaggattgacttggcgatgtgggctcttttttggttccatatgaactttacagtagttttttcctattctgtgaagaaagtcattggtagcttgatggggatggcattgaatctataaattaccttgggcagtatggacattttcacgatattgattcttcctacccatgagcatggaatgttcttccatttgtttgtatcctcttttatttcatcgagcagtggtttgtagttctccttgaagaggtccttcacatcccttgtaagttggattcctaggtattttattctctttgaagcaattgtgaatgggagttcactcatgatttggctctctgtttgtctgttattggtgtataagaatgcttgtgatttttgtacattgactttgtatcctgagactttgctgaagttgcttatcagcttaaggagattttgggctgagacaatggggttttctagatatacaatcatgtcatctgcaaacagggacaatttgacttcctcttttcctaattgaataccctttatttccttctcctgcctgattgccctggccagaacttccaacactatgttgaataggagtggtgagagagggcacccctgtcttgtgccagttttcaaagggaatgcttccagtttttgcccattcagtatgatattggctgtgggtttgtcatagatagctcttattattttgagatatgtcccatcaatacctaatttattgagagtttttagcatgaagggttgttgaattttgtcaaaggccttttctgcatctattgagataatcatgtggtttttgtctttgggtttctttatatgctgtattacatttattgatttgcgtatgttgaaccagccttgcatcccagggatgaagcccacttgatcatggtggataagctttttgatgtgctgctggatttggtttgccagtattttattgaggatttttacatcaatgttcatcaaggatattggtctaaaattctcttttttggttgtgtctctgcctggctttggtatcaggatgatgctagcctcataaaatgagttagggaggattccctctttttctattgattggaatagtttcagaaggaatggtaccagctcctccttgtacctctggtagaattctgctgtgaatccatctggtcctggactctttttggttggtaagctattgattattgccacaatttcagagcctgttattggtctattcagagattcaacttcttcctggtttagtcttgggagggtgtatgtgttgaggaatttatccatttcttctagattttctaatttatttgcgtagaggtgtttgtagtattctctgatggtagtttgtatttctgtgggatcagtggtgatatcccatttatcattttttattgggtctatttgattcttctctctttttttctttattagtcttgctagcggtctatcaattttgttgatcttttcaaaaaaccagctcctggattcattaattttttgaagggttttttgtgtctctatttccttcagttctgctctgattttagttatttcttgccttctgctagcttttgaatgtgttagctcttgcttttctagttcttttaattgtgatgttagggtgtcagttttggatctttcctgctttctcttgtgggcatttagtgctataaatttccctctacacactgctttgaatgcgtcccagagattctggtatgttgttctttgaaaccaatgagaacaaagacacatctttatttctgccttcattttgttatatacccagtagtcattcaggagcaggttgttcagtttccatgtagttgagcagttttgagtgagtttcttaatcctgagttctagtttgattacactgtggtctgagagacagacagtttgttataatttctgttcttttacatttgctgaggagagctttacttccaactatgtggtcaattttggaatagttgtggtgtggtgctgaaaaaaatgtatattctgttgatttggggtggagagttctgtagatgtctattaggtccacttggtgcagagctgagttcaattcctgggtatccttgttaactttctgtctcgttgatctgtctgatgctgacagtggggtgttaaagtcccccattattattgtgtgggtgtctaagtctctttgtaggtcactcaggacttgctttatcaatctgggtgctcctgtattaggtgcatatatatttaggatagttagctcttgttgaattgatccctttaccattatgtaatggccttctttgtctcttttgatctttgttggtttaaagtctgttttatcagagacaaggattgcaacccctgccttttttttgttttccatttgcttggtagatcttcctccatccttttattttgagcctatgtgtgtctctgcacgtgagatgggtttcctgaatacagcacactgatgggtcttgactctttatccaatttgccagtctatgtcttttaattggtgcatttagcccatttacatttaaagttaatattgttatgtgtgaattttgtcctgtcattttgatgttagctggttattttgctcgttagttgatgcagtttcttcctagccttgatggtctttacattttggcatgattttgcagtggctggtactggttgttcctttccatgtttagtgcttccttcaggaggtcttttagggcaggcctggtggtgacaaaatctctcagcatttgcttgtctgtaaagtattttatttctccttcacttatgaagcttagtttggctggatatgaaattctgggttgaaaattcttttctttaagaatgttgaatattggcccccactctcttctggcttgtagagtttctgccgagagatccgctgttagtctgatgggcttccctttgtgggtaacctgacctttctctctggctgcccttaacattttttccttcatttcaactttggtgaatctgacaattatgtgtcttggagttgctcttctcgaggagtatctttgtggcgttctctgtatttcctgaatctgaatgttggcctgccttgctagattggggaagttctcttggataatatcctgcagagtgtttccaacttggttccattctccccgtcactttcaggtacaccaatcagacgtagatctggtcttttcacatagtcccatatttcttggaggctttgttcgtttctttttattcttttttctctgaacttccgttctcgcttcatttcattcatttcatcttccatcactgataccctttcttccagttgatcgcatcggctcctgaggcttctgcattcttcatgtagttctcgagccttggctttcagctccatcagctcctttaagcacttctctgtattggttattctagttatacatttgtctaaatttttttcaaagtttttaacttctttgccatttgtttgaatttcctcctgaagctcggagtagtttgatcgtctgaagccttctctcaactcgtcaaagtcattctccatccagctttgttccattgctggtgaggagctgcattcctttggaggaggagaggcgctctgctttttagagtttccagtttttctgctctgttttttccccatctttatggttttatctagttttggtctttgatgctggtgatgtacagatgggtttttggtgtggatgtcctttctgtttgttagtgttccttctaacagacaggaccctcagctgcaggtctgttggagtttgctagaggtccactccagaccctttttgcctgggtatcagcagcggtggctgcagaacagcggtggctgtagaacagcagatattggtgatctgcaaatgctgctgcctgattgttcctctggaagttttgtctcagaggagtactcagctgtgtgaggtgtcagtctgcccctactgggggggtgtctcccagttaggctgcttggaggtcaaggacccacttcaggaggcagtctgccggatctcagatctccagctgcatgctgggagaaccactactctgttcaaagctgtcagacagggacatttaagtctgcagaggttattgctgtctttttgtttgtgccctgcccctagaggtggagcctacagaggcaggcaggcctccttgagctgtggtgggctccacccagttcgagcttccaggctgctttgtttacctaatcaagcctgggcaatggcaggcgccctcccccagcctcgctgcctccttgcagtttgatctcagactgctgtgctagcaatcagcgagactctgtgggcgtaggaccctccgagccatgtgcaggatataatctcctggtgtgccgttttttaagtccattggaaaagcgcagtattagggtgggagtgacctgattttccaggtgccgtctgtcacccctttctttgactaggaaagggaactccttgaccccttgtgcttcccaagtgaggcaatgcctcaccctgctttggctcacacccagtgtgctgcacccactgccctgcgcccactgtctggcactccctagtgagatgaacccagtacctcagatggaaatgcagaaatcacccgtcttctgcattgctcatgctgggagctgtagaccggagctgttcctattcagccatcttggctccacccctcaaaacttttaaagtaaatattctatgactttgcagttgctacttcttggccatgagctctgtaaaaggatctttgtagtattggttataagtaaaaatctgtaattaattgtacattatttggattggttagagataaatcttcagttccaaggaatcctgttgtatgtagtcacaaaataggacaaaagagatgataaagatatgcgttgttcgagtttattgagcatgtatggtgtgctaggcacttctaagtgcttgacatatattcattcatctgatcctttcaaacactttatgatctatttattttaattctaaaaatttatttattttaagacagtgtctcacccctgtcacccaggctggagtgcagtggcgccatcttggctcactgcaacctccgcttcccaggttcaagtgattctcctgcctc[133 bp omitted]cctcggcctcccaaagtgctggcattacaggtgtgagccactgtgcctagcctgaaaatttatttttaaaaattgagacagggtctcactctgttgcccaggctgaagtgcagtggcacaatcatggctcactgcaccgtcaaactcctgggctgaagtgatccttctgtgtcaggctcatacaccttataatttagatacaatgataaagaagaggaaattcagttagtgagagattaaggaatttgcccaaggtcctataactagtaaaaggcaaaaccttgaaatttgaacctggccagactccagagccagtgctttaaattaagcagctgtgcatcctgtagtaggtggatgtgacatgtgccttgaaagcacaggaagagctatatacctgtccagggggttgctgaaggcctgtgaactttgcaaacgttaaaaacaatgatagggccaggctcagtggctcacacctataatcacagcactttgggaggccaaggcgggcagatcattggaggtcaggagtttgagaccagcctggccaacatggtgaaaccccgtctctactaaataaatacaaaaattagccgggcatggtagtagacgcctgtaatcccacctacttgggaggctaaggcaggagaatctcttgaacccgggaggcggaggttgcagtgagcagagattgcgccactgctccagcacgggtgacagagtgagactccatctcaaaaaagaaaaaaacaaaaaacagtgataaactacaggctttatggggatgagcgtaggagatagtgagacagggaaaactgtaacagctgaaaattgactgagatctcttggaatctataacaacttttttgtggtgctcttttccttcttgatgccacccttcttctagtgaaggttggttgtaagattgaggttacatgtgtttgatattgtaggaggctgtgacattcaaggatgtggctgtggtcttctccagggaggaactgcgactgctcgatcttacccagaggaagctgtaccgagatgtcatggtggagaacttcaagaacctggttgcagtgggtgaggacaggcactctctgaccctgaacttcagttcccttgagaatctctttgctctcaggtgtttaagggtttggaccttttaaaatggttctttgctcttgaagacaaaaggttttctaatccctgggaaaacaggataggtttttctggtctttctgctcaggcaaaattctgtccttttaaattgctggttctcaaccatgggtgatttcgcccccagaagatatttggcaatgtctggaaatggttgtcacacctgacagaggggtgctattggcattttgtgggtagtatccaggaattctgcaaaatctcctacagtgcacaggacagtgcccccaacagagaattggccagtccaaaatagtagtgctgcagttgcaaaaccctgttttaaatgaaccgtaaatggacacattagcttctatgctttatctttcaaatacgttgtctttcaaatgaaacccatcaatgcattaacttagtgcactgtactggcttttttttcaatgaaataaaacagataaggatagaaaatatcagagcttcttatcaggaactgctcacattgcaacaaaaactgacaattttcagtgaatggtgtgagatacagcattgcaaatgtgatgaaaacagacattagccaagtataacttgagagagagatatattatatatatatgaactaggctacaacctaaatttcttattatagttcatgatcttaaaacatcttaaaataaatcactctagaggccgggcatggtggcttacgcctttaattgcagcaatacgggaggccagggtgggtggatcacttgaggtcacgagttcaagaccatcctggccaacatggtgaaaccccatctctactaaaaatgcaaaaattagccgggtgtggtggcaggtgcctgtaatcccaactactcgggaggctgaggcaggagacttgcttgaaccctggaggcagaggttgcagtgagccgagattgtgccattgcacttcagcctgggcgatagagtgagactctgtctcaaaataaataaataaaataataaaatatcactatagaggttgtgaggcttatagggttcagacaaaaatgtgttttagttgtgtgttcatcttaaatacataaaaatctacattttcatagggcatcttcccttccaaccagatatggtatcccaattggaagcagaagaaaagctttggatgatggaaacagaaacccaaagaagtaggtattctggtgagaaccctgtgtctgttctttcaggtactggttagtctgcatcttaccatgtccatgacctccctggtctgagtgttaaaatctttcacctggattataacaatagcttccatgctggtctccccacctcctcccttgtgctcctataatctgctttctaaatggtagccggagtggttctttttttaatctttatttttttgagacagggtctcaccctgtcacccaggctggagtgcagcagcatgattgtagctcactgcagcctcaacctcctgatttcaagtggtcctcccacctcagcctcctaagtagctaggactataggtatatatcatgatacctggctaattttttattttttgtagagatgaggtcttgctgtgttgcccaggctggtctcaaactcctggactcaagcagtcttcccacctcggcctcccaaagtgctgggattacagatgtgagttgccgcacccggcccagaatggttctttaaagaacacatgagatgatgttattcctctgctcagaagccttcacaaccttcccatttcactcaaagtccttgtactgaactgcaagaccctacctggtctcatctcaccaagtttctctttgatctcccattcctttccctttgcttagatcatttcagccatgctggccgccgttggagtatttgttaagcataccaagttcccttctcttccatggcttctaattagctctcctcattgccttggtggagaggctccccagcaccttacttactgcactcaggtcattcctcaaatgttatatcattagagaggccttctatgtttaaatttaccattttaatttaaaataccatcttccttccattttccatccccttacctttcctttctctccttctttgctttctcttgaatttgcatattcctcaggtctattgacttaaaaattaaaagtaagctgggtatggtggtacatacctgtaatcctggctacatgggaggctgaagtgagaggatcacttgagctgaagagttccagaccaacctgggcaacatagtgagactccatctctacaaaaaaaaaaaaaaaaaaatatatatatatatatatatatatatatcttagccaggcatgttagcatacatctgtagtcccagctacttgggaggagcatcaagtgagcccaggaatttgagaccaacctggacaacatagtgagaccttgtctcccacacacacaaaattaaaagtaaaaattagatattcctagatgatgtgaattttttttttttttgagaccgagtcttgcttgctctgtcacctaggctggaaagcagtggtgccatcttggctcactgcaacctctgcctcccgggttcaagtgattgtcctgcctcagcctccgaagttactgggattacaggtgaccaccaccatgcccaactaatttttgtatttttaatagagatggggtttcaccatgttggccaggctggtattgaagttctgatcttacccactttggcctcccaaaagtgtcacccaggctggagtgcagtggcatgatcttggctcactgcaaccttcgcctcctgggttcaagcaattctgctttagcctcccgagtagctgggattacaggcgcctgccaccacacccggctaatttttgtatttttagtagagatggggtttcaccatgttggccaggctggtctcgaactcctgagatcgtggtccacctgtctcagcctcccaaaatgctgggattacaggcatgaaccaccatgctcagccaaagggtttgtttttataagaattcttaacaaaaaacttacagagaatggagacaagtagatatcacatcccttttactcagagttagctcatagattgagagcacaccagtgtgattaattatttgggaacactgtcttctagtgaatgtctaacataattagtaatttctaagacatttttggacatgtaaatattcaaacctactaaccttagaagataaaagctattcacagttgttggaatgtagaacttcactatcaaaaattatcagtggcaatatggcaggtattatagttcatcagtttccctgtatcaatttcaagttggctttactcattggtgaaaactgccttatccatacagctgacttcccactttcccatttccccttccctctaataccaaaacagttatataacctacatacagtagttctttagcagttttgaattggacatttccagaagtccagaggcactgacatacctgtggagttgaggtgagtcctgattaggcaaagaaaattccagaatttctaaattgggtttccagtgtaatttgcatccacatgtattaatcttagcttctagcaccagcaatgtgagaagcactttacatgttgcagtgacttctgacaccaaacacctgaagttaggccggactttcagagtaagggcatagttttccacaagactgctctctatatcgctctaagtttatatatcgctctaagtttagggattcccagataattttgctcacctctgaccaagtagctacaaatttgggagttcccgtgataatttgttagaatgactgacagaactcgggaaggtgctggacttacagttttattatagcaaaaaagatacatgttggaagcagcaaaagggagagatatatagggtgaaatctgggtggcttccctctttcttcccttttgtaaggacttgtgattactttaggctcattggataatctaggataatctccttaagagctttcatttaatcatatctataaattgcttgtttttttgttttttttttttgtagacggagtcatgctccgtcgtccaggctaaagtgcagtggtgcaatcttggctcactgcaacctctgccttctgggatcaagcgattctcatatctcagcttccctagtagcttacaggtgcctgccaccatgccaggctaattgtttttttagttttttagcggagacggggtttcaccatgttgtgggccaggctggtctcgaactcctgacctcaagtgatccacctgcctcggcctcacaaagtgctgggattacaggtgtgagccactgtgcctggcctgtaaattcctttttgccatgtacattaactattcacaggtttgagagttcaggctgtggacatctcttgggggtggggtgtcattactcagcctgccatatccagaaatgtgtagacacctgttgctatttttttttcagtttgtattattagaatgtaacatttcatttaggcaaattatttgattaggacttggtaaaccaccccctaaacattttaagccaaggtctttcatacgtttctaaccatgaccctcaacataagtataattttacatcttgactaagcataaatatgtttatatttatgtgtatatttaccaactaaaacaagtatttcctatagtagtactcttattgcttttaatacactaagcatgtcttattctgttttttgtttttttgtcagtcacaagttacatacttggtttcatggtgcactaatgcattgcaacaatttgaaaacccttgttaacagtggggataaagcaatgaagaaaacaaaatgcgtgtttttttcatgaccgttacattctactgggtctaaagagacaaaggaaagtatatagtaaatcaaataataagtactgtggggaaaagtcaagcagggtaattgaactggaaagagtcgaaggtgtatggcaggccgggcgtggtggttcagcctgtaatcccagcactctgggaggccgaggtgggcagattacttgaggtcgggagttcgagaccagcctggccaacatggcaaaaccccatctctactaaaaatacaaaaattggctgagtgtagtggcatgcgccagtaatccccgctacccgggaggctgaggag[134 bp omitted]tacatcgtgtgttatggaaggcatcacagataaagtaacatgtaacatgtgagcagagacctgaagggagcgagagaacaagcaaggctccctgctttctgggaggaagtttccaagctgaacatacctctccctctcttcgtcttctgtgttggctttgagagtttgcactatgctctatttcctctccgaagttctctcctagttatacaagattagctttcccttttccacttgtccagagacctggatttctaccaggttttagaacaatcatattattccaactgccttcccaaatctgttggagaataatttctatcaggatctaaaatagtatttcatgcctacagtctgaacttttcttaacctaactagttattagaatcccgcttgtcataagcctactgaggaagaggtgagtaggctgttcattgatgttattgtaggttggaatatggattttctttttgttgccctgcagctacctgattttagcttttagctctcatattaaactgttagacttacggttctacatggatcatgtttatacttagtgaatgggagcctgttgaccccactcttcgtttacacctgtatgaaaaacatgtcaaaagaatacacgatgctgtaaggacaaggtcacctttcgcctggtttatcaaggctttctcccatggcctaagtgtgaaattctgatatttctgaagaaagcatttactgccctcatctctaaatattgccttttttcttttttaataggcagcaagcatcaaaataagatggaaacactccaaaaatttgcattaaaatacctttcaaatcaagagctgtcctgctggcaaatctggaaacaggttgcaagtgaattaaccaggtgtcttcaggggaagagttcccagttattacaaggtgactctattcaggtttctgaaaatgagaacaatataatgaaccctaaaggagatagctctatttatattgaaaatcaagagtttccattttggagaacccagcattcttgcgggaatacatatctgagtgagtcacagattcagagtagaggtaagcaaattgatgtgaaaaataacctgcaaatacatgaagacttcatgaagaaatcaccatttcatgagcatattaaaactgacacagaaccaaaaccctgcaaaggtaatgaatatggcaaaatcattagtgatggctccaatcagaaattacccttaggagagaaaccccatccatgtggtgagtgtggaaggggcttcagttatagcccaaggcttccccttcatccgaatgttcatacaggagaaaaatgcttcagtcaaagctcacatctgcgaactcatcagagaattcacccaggagagaaactcaatagatgtcatgaatctggtgattgcttcaataagagctcttttcattcttatcaatctaatcatacaggagagaagtcttatagatgcgacagttgcggcaagggattcagtagcagcacgggtcttatcattcattacagaactcatactggagagaaaccctataaatgcgaggaatgtggtaaatgctttagtcaaagttcaaattttcagtgccatcagagagtccacactgaagaaaaaccatacaaatgcgaagagtgtggtaagggcttcggttggagtgttaatctccgtgttcaccagagggtccacaggggtgagaagccctataaatgtgaggaatgtggtaagggcttcactcaggctgcacattttcacatccatcagagagtccacactggagagaaaccctacaagtgtgatgtgtgtggtaagggcttcagccacaattcaccattaatatgccatcggagagtccacacaggagagaagccatacaagtgtgaggcgtgtgggaaaggctttacccgtaatacagatctgcatattcatttcagagttcacacgggagagaaaccctataaatgtaaggagtgtggtaagggcttcagtcaggcttcaaatcttcaagtccatcagaatgtccacactggggagaaacgattcaagtgtgaaacgtgtgggaagggcttcagtcagtcctcaaagcttcaaacccatcagcgagtccacactggagagaaaccatatagatgtgatgtgtgtggtaaggacttcagttatagttcaaatcttaaactacaccaagtaattcacactggagaaaaaccatataaatgtgaggaatgtgggaagggcttcagttggagatcaaatcttcatgcacatcaaagagttcactcaggagaaaaaccctataaatgtgagcagtgtgataagagcttcagtcaggccatagattttcgggtacatcagagagtccatactggagagaagccatacaaatgtggtgtctgtggtaagggcttcagtcagtcctctggtcttcaatcccatcagagagtccacacgggggaaaagccatacaaatgtgatgtgtgtggaaagggctttagatacagttcgcagtttatataccatcagagaggccacactggagaaaaaccttacaaatgtgaagagtgtgggaaaggctttggtaggagcttgaatcttcgccatcatcagagggtccacacgggagagaaaccccatatatgtgaggagtgtggtaaggccttcagtctcccctcaaatcttcgagtccacctgggtgttcacaccagggaaaaactctttaaatgtgaagagtgtggtaaaggcttcagtcagagtgcacgtcttgaagcccatcagagagtccacactggagaaaaaccatacaaatgtgacatatgtgataaggacttccgtcaccgttcacgtcttacatatcatcagaaagtccatactggtaaaaagctttagaaatgagaaatgtgttaccaacttttgtctgaatgcacatcttcaagtttttggctagtccatgctggtggtaaaccctgtaaaactactgagagtggaagggggtttgttcacacttggaatctttctaacaaatccatcaagatgataacacagaaccatgaacaggaatagaactcgtatttaggggagaaatagggctggtggctctcttggtaagatctagttaatataaatgatcacctttcattgtgaatatatgcctgaagataatgtgtggaaggatatttgccatatgctaactggttttttggccagggagagttttgggttattatcccttttctttaattttcattttatacttacagtgatcattattttcataaaagctgtaaagctatgaaaaatgaataaaattactaaaaattttctgtagctaaggactcatgattcttttatatggtatataggtgtaaaattaaggaatatatccccagagatgaatctttgatcttcagaagtaa[139 bp omitted]ggtgaaaccccatctctactaaaaatacaaaaaattggccaggcatggtggcacgtgcctgtagtcctagctactcgggaggcggaggcaggagaatcgcttgaacccaggaggtggagttcgcagtgagccaagattgcgccactgcactccagcctggtgacagagcgagactccatctcaaataaataaagaagaaagagagagagagagcaagagaaagagaaaagaggatagtcggtgcatcattgttttagtagcaaacatagaaatacttggattgccaaagtattttgtgctttaccaatccagtggcacactatgcagacatcaaatgggaaaaggtaaatttttagctgtggatattggaagatgttcagaatatattaacttgaaaaacaaaatgtgagatttttatgtgatcctattttgtaaaaacgcatagatgaatgggtattatagttctctctaaataatgggattttactttatgtatatttttatatttctttaaacttattttgaaataatttgaaactttcagaaaaattacagaaattatataaaagctcccatatactctttacccagattcaccagttgttaagatgtttgaattattctctcaataagtatgagcgtgtatatactgatacttatacatactaaacgcatttatatataaagttttgccatatgaatatgttacagacatccttctccctacactaaatacttaagtgtgctttcctaagaacaaggatatctacttagttacagtacaacattccagtgatttatttatttagagacagggtctcattctgttgcccaggctgagtgcagggtggtgattatagctcaccgcagccttgaactcctgggctcaagcaatcctccccactcagcctttcaagtagctgggactgcaggcgtggaccaccatgcccacctaatttttaagatttttgtagagatgggctctcgctatgttgtctaagctggtatcgaactcttgggcttaagtgatcgttccacctcagccttccaaaatgcaaggtttacaggcatgagccactgcacccagaaagaaaatttattattgatacataacactatgtaacctacagaccttatttaaatcttaaaattatcccaataatatatttattgtttttctgctctagagtccaaagattacacattgcatttagactcctttaatctgagttgctacctctgtttttaatgaccttgatatttttgagattattttgtagaatgtctcttaatttggatttgcctgaggtttccttacaattggatttaaattacacatttttttcccatgaggactctgtaagtggtgtgcagcacgtgaggaaacgaggtatgtttgtacctttataggtgatgttaacttggaacacttgattggggagggcggtgctgggtttttccactgcgaaattactatttttttctttgtaattaataattacaaaggcaactcctggggagacactttctgactctaaatagcttgtttttcagtaaattttcctccactagtttaagcattctgtaagtctggtctaaatcagtaattgctctgatggtgcgaaagtgtgatatattcaactttcatcattcctccaacacttgttagattgttgttctactctaaggaagtttcccttctgtcctgtttgcccatcatgtatttttaaataaattggagcacatctttactctgacacaatacagtgttccaagctcatcttgtacccttcctgcaccatccatggaatttgctgtttctttgagaactcagattcttctgattgggggatggtagttaaacatcaagatctgggtaatagctgtgcctttttttttttccctctaggaaggaggggaaagagttatacagataggaagagaagtagaaaggtagaaagaattaatgatgagttcctgcttttatctctagttcttaaattaatatcatagtgttttttttctagccttacccccattctatgttgcatcttcattcttcaagaatcagaaatttgtctcccagtatcattcatatatttactggggaatgtggacatgcatccaactagaacttgggggttctgtctttcagagagaacgggagtattggatgactgatgccagagatgatttttgaatggcatagtctcccaaacattataatttttcctattctcagggtattgaccctttaaaccaaataaaatgttcccgtagggccatgaagaaaagtatctgatagaaatatccaaagatagatatattcagatgagagccttccagtcaatgtttccttgcagatagtgttaaggaatggtttctggtgaagtgttgcggagctctcctagcctgtgagtgtcacggatgccattgattagcattgctttactttatttacctctcattctctgaaccttctcagaggtagtttgacaaagttctcaaagcacatccctctactgcttcttgagaggaccaaggcattttaggagaaactagtgttaacgagaccaagtcagaatattggtaataaagtagtagagtataatagaaagcagactgtcagccaggcacagtggctcacacctatagtctcaactactcaggaggctgaggtgggaggatcacttgagcccaggagtttgaagctgcagtgagctgtgattggaccactgcattccagcctgggtgacagtgagaccccatcttgaaaaagccaactgggtgcagtggctcccgcctttaatcccagcactttggctggccgaagtgggtggatcacctgaggttaggagttccagaccagtctagtcaacatggtgaagccctgtctctactaaaaatacaaaaagttagccaggcgtggtggttagcccctgtaatcctagctattcggctgaggcaggagaatcaattgaacccagcaggtggatgttgtagtgagctcagatcgtgccattgcactccagcctgggcaacgagtgaaactccatctcaaaaaaaaaaaaaaaaaaagaaaagaagaaaagaaaaagccaaccctggaaccctggaattagactttcttgctcagtgtaaccatttgctagttgcgtaactgcaggcaaaatgcttaacctctctattcctcaatttgcttgtgtcttcaatgtttgaggataatatcttttagttctgtggtaagggttaaaactatatgcctggcatatagtaagacctgtatagtgttaactattattttcaacatagatgtcactattactagatttctgctaatttatatttgaaatttctaaggaagggatcagtaaactatagcctgctggccaaatctagcctgtgtcctctctttgtacaacacgagagctgagattttaaatgtttaaagagttgtaagaaaaaaaaaatgctacagagaccatctgtggcccgcaagacttaaaacattactgtctggccctttttaggaagtttgccgttctctgatctaagcaaattttagtttctcagaagccttgcttctgagatacatacatactacagatatgtattatctcaattcagtacttctcaaatcttttaggtttaaaaaaaatgctcgaattgacataagaaaacacaagcatattttttacagaaaattgggaccatatatgaagcaatgtgctgtgtgtccaatgtgtagttaatctgcaattctatgaataaatgttattggtttttttttttttttttggtaagtaaacttaggttttacaggtttaagtaccttccctaagtcagtcagtagtgaatgtcacaaccacagtttgaactcaggtctatcttgctgacttcaaaactactcttaaatgctatgtgcataaattacattgcaaggccagaactcctaagtttacattctgtagagcatgcatcccatttcacacaagtaaagtgcaaatataagaatggaatatccttcaaaaagaacgaaatttgcctaggaagtcttttgctccatttcgactcaggcttttcctatactaagtcaataatctaggcaagcttgtccaacttgcagcccaggacagctttgaaagtggcccaacacaaattcataaactttctaaaacatgagattgtttttgcaaatttttaaagctcatcagctattttatgggtgacccaagacaattattcttctagtgtggcccagggaagctaaaagattggacacctcgatctaggagatatgttttgtatttcctatgtccttgattacatttctgacctcgttgatgccattaatttttaaatatttcttcttgtttgatgattaaaaatccaatactgaaaaattaactcaaatgttgaaaaagaacagccatgtttgaagctttaacctagcagttgtaacctaactgaatgtacctcttccaactgtaattttgcagtccacttgaggaaggaatcctttttaggacttacctgaaactatttacttggcagttcctccacaaaatcaggtttatttaaaaatatgcagctttttccaggcatggtggctcatgcctgtaatctcagcactttcagaggctgaggcaggagaatggcttgaaccccggagttcaagaccagcatgggcaacatagtgagaccccatctctacaaaaaaatcaaaaaattagccgggcattgtgtcacgtgcctatagtcccagctacaggctcagtggctgaagtgggaggattgctagagcccaggaggttgaggctgcagttgtgatgttgcactgctctccagcctggggccctgactcagaaataataatcttaaaaatgcaggttttaggatagccattcacttgaaaattctaagttggagagccttttgacaatgtatacccatatttctcttctctttttccctcccccttttaagttgtgaggtataattaacatacaataagctgtacatatttaaagtgttcgatttttaaagttttaatatgtgtatctttgaaaccatcaccacaatcaagatagcaaaaatatccatcattcttcaaagtcacctcatatctcccttttaatctccattctgctcctccccaatccccaagcaaccactgatctgctttctgacactgtatagtttgcattttctacaattctaacaaatggaaactgtacagtatatactttttttcctaacttcttgcagaaagagattcatccttgttgtttgtatagaattaattctttattactgagcattactgtaagtgtgtagatataccataattttttaaaaaaaatccatctgttgatggggatttgagttctcaaacttttggctattataaatgctatgacatgctatgaacacttgtttgtgtacaagtgtttgcatggagatatgtatagtctagaaatatatatatatataccatatataactcgactatatattttatcttggataaatagctaggaattgaataactggatcatatggtaaatatatgtataacttttattgtatttttaatttggtatttttatttatcagagttatagaaatttggaggagtacatgtggtatttcaatacatgtgtacaatgtgtaatgatcaaatcggtgtagttgggatgcccatcaccccaaacattgtgtttaacttttttttgtgtgttttgagacggagtcttgctctgttgcccaggctggagtgcagtggcatgatcttggctcactgcaacatcggcctgcggggttcaagcaattctcctgcctcagcctcctgagtagctgggactacaggcatgtggcaccatgccttgctaattttttatatttttagtagagatggggtttcaccg[136 bp omitted]tgggtgtgctgttttacgttttcaccagcagtgtgcatcttttcttcacattttcatcaaaatatgtaacggtcggtctcttttaattttagccattctaccctagtagtatctcactgtgtttttaatttgcatttttctaaacatgtttttcatgtgctgttttccattatcatatctttggtaaagtctacttaaatactttgcccatttttttattgggttacttgttttcttattgagttttgtgggttctttgtatattattgatacaagtgctttatcaggcatgtgatttccaaaattttttcactcagtctgtggttaagcagaagtttaaaatttttatgaagtctagtttatcataattttctttgatgtatcatgcttttggtgtcatatctaagaaacctttgcctaatccaaggtctcaaagactttctcctatgttttctgctaactttataagtttaggtgtttttttttttttttttttttgagacggagtctcgctctgtcgcccaggctgtagtgcagtggcacgatctcggctcacggcaagctccgcctcccgcgttcacgccattctcctgcctc[222 bp omitted]ataatacttatatataatacaaaacacgtttattcatcttaaaactatggatgtccagttatgccaacaccatttgttgaaaaaatgatcttttctccattgaattgactttgtgtctttgtcaaaaatcaattgaccgtatatgagtgggcctatttctgaactctccattctagctcgttgatctttttgtctcttcaccatacacagccagttgttcttgattactaacatagctttatagtaattctctctaaatcaggtagcacgagtcttccaactttgctttttcaaaattgttttagctattctagttcttttgctttttcatgtaagttgtagaatcatcttgttgattcttttaaagaatatttgcagggcttttaatgggaagtgtgttggaagatttgacttctttagtcttccaatcagtgaaaatggcatgtctcttcacttatttaggtcttttatttcatcagtgatttgtatttttcagtacacagatattgcctgttttcttagacttgtacttaaaaaattcctgaaaattttgttctgttgtaagtttctatttgttcataatagtatatagaaatgcaacttatttatattaacattgtatattaacattgcatcccaggaccttttgaaactgatttattagttctggtaactttttcattctttatacataatcatgttgtatgcaaatggagacagttatttcttgttttccaatatgttttctgtttctttgcttgtttccctaagagctttttctgcatctactaagatgattgaagagtttttgttctttagtctattaatatagtgacttaacattcattttaaaatgttcgaacaacattgcattcctgagataaacctacttaatcatgatgtagtattattttcatatattcgacttgctggtatttgttgaagaattttgtgtctatgtttatgaggaatattgatctgttgtcttcatgcatttttctaattttggtaacaagataatgctagccttataaaatgagttgggaagtgtttttctcctctttattttcttctttttcctcaaaatgtttgtgtagaattggtagtttcttttcccttaaatgtttggtacatataagaggcttaggcctggtggtggtgtttctggaggtgttttaacttgaattcaatctcattaataggtataggaatattcaggatgtctgtttattcttgaataaattttggtagtttttcttttttaaatacattgtctatttcatctaggttgtcacatatggcataaagttgttcataatatttccttattatcattttaatgtcattaggatctggcgtgtgtgtgtgtgtgtgtgtgtgtgtgtgtgtgtgtgtctcccaggctggagtgcagtggcacaatcttgcattcacagcaccctttgcctccggggcaggtttaagtgattctcctgcctcagcctcctgggtagctggtatttttagtagagagggggttttgccatgttggccaggctggtctcaaactcctgacccctgaagtgatccacctgcctcagcctcccaaagtgcagggattacaggcgtgagccactgcacctggcctgtcattaggatctgtaatcatatccttctttcagtcctacaattggtaatttctgttttgttttcttgttcttttcaaagtttattgctttttcttcactattgttatccttttcgtttggttgatttctgctttcatttttgttgttttcttctttcttgcttaggggtttttcttttttcatagacagggtctcactctgttacccaggctagtctcaaactcctgggctcaagcagttctcctgccttggcctcccccaaatcctgggattacaggtgtgaaccattgcacccagcttttttttttaaagtttattaagcttaaaaaagcttagataattgatgtaagttccttttcttccaatataagcatttcatgctctaaatttttctctaaatgctgccttagtggcattctacaagttctgatatgttatctttttatttttatttcttattttcccttttctcttctaactcatggggttttttttgacccatgggttatttaatttctaagggtagtgggggattttcctgagattgttttgttattgattctcatttaattttgttgtgatatgagaatatactttgtgtggtttcaattcttttaaattggtgcagtgaattacatggcccagagtatgatccatcttggtgtatgttttaatgatgttgattaataatgttgttgaggtcttctatatccttactggttttcttttcttttttccatcacggcaagagttcatcatgacttactggttttctatttgttttattgattaatgagaatgaagtctccagctgttaattgtgggttgtttagtctttgtctttatcagttttggctttgtatattttgaagctctgttgttttgtgcatacacatttaattttatgtctttttggtgaaattacctctttattattatttaatgtccctcttatttctggtaataatccttgttttgatgcctactttgtttgcttttaatatcaccactatagcctttttttttttttttttttttttttttttttttttttttgagagggagtcttgctctgtcgcccaggctggagtgcaatggcacgatctcggttcactgcaagctctgcctcccaggttcatgccattctcctgcctcagcctcccaagtagctgggactacaggcgcccgccaccatgcccagctaatttttttctatttttagtagagatggggtttcaccatgttagctaggatggtctcaatctcttaacctcgtgatccgcctgccttggcctcccaaagtgctgggattacaggcttgagccaccgcgcccggcccactgtagccttttattagtgtttgcctaatagtagtatagccactccagctttaatttgattattgttgctttattctccaatctgatgatttgttataattggtatgtttatgtcatttatatatcatttagtaattgatatggtcagatataaatctatttttggttaccttctttgtttcttttccttttgttacacattttttgctaatttttaaatatgatttcatatcgtatccacaattagcttatttttacaggctgaatatcccttacccaaaatgtttgggattaggagtgttcagatttcggattttttcagattgtggaatatttgtattgtagttatcagttgagtatttgcagtctgaacatctgaaatccaaaacactcccatcagcatttcctttgagttgtcatgtaagcactcaaaaaaattcagattttacagcatttggatgttcaggttggggtactcaacctgtacctcttttcattattgttttagcgtttactgtagaatttacaatattcatctatagttaatgacagcctctctttaaataatatatactattttatttattttatttcactaggtttttgggaaacaggtggtgtttggttaatgagattttgaatatatactctttacttatacaactgtacactcccaattccttccttcaaacttttgtccaattgtcaagcatttgtcgttggcatatgctataaagccacagtacattgctattatttttgctttaggagtcaagtgtctttcagagcaattaaaagttaaattcttaactgcttctggaaatcgtcattactttgcaagtttaccaaattttatatagcatcctttctgtttgaagaactttctttaatgtttcttgtactgctggttggctgctactgaattttttcagtttttgtcttaaaaagttttcattatatcttcattttcgagggatgtatttgctgggtatggaattatgtgttgttgtttttttctttctatactctttgtattctggtttgcatagtttctaatgagacatgtcctgtaattctcatctttgattctttgtatgtattgtgtctcctcacccatcccctgcctttggccgccttcaaaattttctctttattttgaatttactgcagtttcaatatgatgtgtctaggtgtgattgtttttatttttattttaaaaatacagatactaccattgaaaatccacagaaatatattcattcacctagaaactcttgtttcttactacattcttcatgtaataaaccaaaggatggaagggtgtatattttagtacattagaaaaagctcatttgcatatacttcttgaatttttcatgtgcacaaagacccactgaaagtatacacgaaaaactaacactggtcgggcgtgatgacttatgcttgtaatcccaacactttgagaggacgaggcagacagatcacttgaggtcaggagttcgagaccagcctgggcaacatggtgaaactccatctctactaaaaatacaaaaatcagccaggcgtggcggtacacatatgtaatcccagctacttgggaggctgaggcaggagaatcgcttgaacccaagaggcagaggttgcaatgagccaggattgtgccattgcactccagcgtgggtgacagagcaagactccatctcaaaaaaaaacaaaccaacaaaaaaaaaacacaaagattacatgtggtacatgggcttttggtataggcaaacaaccttgggtcagaatgggatgagttttcaaggtatattgtttatattattttaattttgtaccatgtaaatatattacctagtatagaaaaaaatttaaagcaaatttccccaaatgcattaatgggccttattttttcctttgcctagtttaattatttgattagagtctcagtattctctcatttataatacatatagacagttacacatccatatcttcatatttacacaattttagaaagtattacatttccctacagcctcactccatgggaagagtattgttaactggccattgtgttttaactcaccactggaaaagaaaaattaaacacacgtttaacaacgcagttttaaaacctaacaaagacccagtccacagaccccatatatgttactggctgctgctcaggatggtattttcatccctgagagattggaatgcttttttattttttgttgtcaatgggttttctcttgcctcattccaatcttactatttttctgcaaagcttgtttccctagtcctgctttcatccagaataaaagttcttaaaagcctatttctatcattaactaactccaggcttcacaatgagaacagtgaaaatatagtttctttttcctgaatcccataattagaactaccttgcagttcatattgtggacttctgttcattttcttctctccagctccagcattagctcatttatccaatcctatgttatccccagttgtctccacctcccctccaccccctagagttacagagacctcatattaccaggtgtttgaactacaggagttattgctacattttgctccccattccagtccaattgtacctgacaatattccaatttcaaatccattaagtataaactgttttaagaatggcaaagtataggctcaaaataaagagatggagaaatatttaccaagcaaatggaaagaaaaataaagcaggggtttcaatcctagtctctgataaaacagactttaacaatgataaaaaaaatacaaagaagggcattacataatggtaaagagatcaatgcaacaagaagagctaactatcctaaatatatatgcacccaatacaggagcacctagattcataaggtaagttcttagagacctacaaggagacttaagactcccacacaataacagtgggatactttatcacccaactgccaatattagacagatcaacaagacagaaaattaacaaggatattcaggacttaaactcagctctggaccaagtggacctaatagacatctacagaactctccatcccaaatcaacagaatatacattcttctcagtgacacatagcatgtattctagaattgaccacataattggaagtaaaacactcctcagcaaatgcaaaagaacagaaatcataacagtctctcaggccacagtgcaatcaaattagaactcaggattaagaaactcactgaaaactgcacaactacatggaaaccgaacaacctgctcctgaatgactactgggtaaataatgaaatttgggcagaaataaataagttattttaaatcattgagaacaaagacacaacgtaccagaatctgtgggtcacagcgaaagcagtgtttagagggaaatttatagcactaaatgccaacaggagatagcaggaaagatctaaaatcgacactctaacatcacaattaaaagaagtagagaagcaagagcaaacaaattcaaaagctagcagaagacaagaaataactaacatcagagcacacctgaaggagatagagacacaaaaaacccttcaaaaaaatcagtgaatgcaggagctggctttttggaaagactaacaaaacagagagaccactagtcagactaataaagaagagaaaagagaagaatcaaatagacacaataaaaaatgataaaggggatatcaccactgatcccacagaaatacagactaccatcagagagtactataaacacctctatgcaaataaactagaaaatttagaagaaatggatacattcctggacacatacaccatcccaagactaaaccaggaataagttgtatccctgaatagaccaataagaaattctgaaattgaggcagtaattaatagcctaccaaccaaaaaaaaagcccaggaccagatggattcacagccaaattctaccaaaggtacaaagaggagctggtaccattccttctgaaactattccaaacaatagaaaaagagggactcctccataactcatttcatgatgctagcatcatcctgataagaaaacctggcagagacaaaacaaaaaaagaaaatttcaggccaatatctttgatgaacatcaatgtgaaaaatcctcaataaaatactggcaaaccgaatccagcagcacatcaaaaaacttaaccaccatgatcaagttggcttcatccctgggatgtaaggctggttcaacatatgcaaatcaataaacataatccattacataaacagaaccgatgacaaaaaccacatgattacctcaataaatgcagaaaaaggccttcaataaaattcaataccccttcttgctaaaaactctcaataagctaggtactgatggaatgtatctcaaaataataagagctatttatgaccaacccatagccaatatcatactgaatgggcaaaagctggaagcattccctttgaacactggcataagacaaggaagacctctcttaccactcctattcaacatagtattagaagttctagccagggcaatcaggcaagagaaagaaataaagtgtattcaaataggaagagaggaagtcaaattgtttctgtttgcagatgacatgactgtgtatttagaaaagcccatcatctcagcctgaaatctccttaagctgataagcaacttcagcaaagtctcaggatacaaaatcagtgtgcaaaaatcacaagcattcctatagaccaataatagacaaacagccaaatcatgagtgaactcccattcacaattactacaaagagaataaagtacctaggaataaaacttacaagggatgtgaaggacctcttcaaggagaactacaaaccactgctcaaggaaataagagaggacacaaacaaatggaaaaacattccatgcccatggataggaagaatcgatatcgtgaaaatggccaccatacctcccaaagtaatgtatagattcaaggctattcccatcaaactgccattgactttcttcacagaattagaaaaaactactttaaatttcatatggaaccaaaaaagagccctatagtcaagacaatcctaagcaaaaagaacaaagctggaggcatcacgctacccgacttcaaactatactacaaggctacagtagccaaaacagcatggtactcataccaaaacagatatacagacaaattgaacagaagagaagcttcagaaataacaccacacatctaaaaccatctgatctttgacaaacctgacaaaaacaagcaatagggaagggattccctatttaataaatggtgttgggaaaactggctagccatatgcagaaaactgaaactggacctcttccttataccttatacaaaaattaactcaagatggattaaagacttaaacataagacctaaaaccatacaaaccttagaagaaaacctaggcaataccattcaggacataggcatgggcaaagacttcatgactaaaacacgaaaagcaatgacaacaaaagcaaaaactgatgaatgggatctaattaaagtgcttctgcacagcaaaagaaactatcatcagagtcaacaggcaacctacagaatgggagaaaaattttggaatctatccatctgacaaagggctaatatccagattctacaaggaacttaaacaaatttactaggaaaaaaaaaaaaactaaccccatcaaaaagtgggcaaaggatatgagcagacacttctcaaaggaagacatttatgcagccaacaaacatatgagaaaaagctcatcgtcactggtcattagagaaatgcaaatcaaaaccacaataagataccatctcatgccagttagaatggtgatcattaaaaagtcaggaaacaacagatactggagagaatgtggagaaataggaatgcttttacactgttggtgggagtgtaaattagttccaccattgtggaagaccgtgtggcaattcctcaaggatctagaaccagaaataccatttgacccagcaatcccattactgggtatatacccaaaggattataaatcatcctactgtaaagagacatgcatacgtatgtttattgcagcactattcacaatagagaagacttggaagcaacccaaatgcccatcaatgatagactgaataaagaacatatggcacatatacaccatggaatactatgcagccataaaaaggattaattcatgtcctttgcagggacatggatgaagctggaaaccatcattcttagcaaactaactctggaacagaaaaccaaacaccacatgttcacactcataagtgggagttgaagaatgagaacacatggacacggggaggggaacatcacacactggggccttttgagggttgaggtgctaggggagggatagcattagaagaaatacctaatgtagatgacgggttgatgggtgcagcacaccaccatggcatgtgtatacctacgtaacctgcacattctgcacatgtatcccagaacttacagtattaaaaaaaaaaaaaaagagtggcaaagtaatgtcagagaaatgatggagtaggtagcttcaacggcccatccttccacagaaacaaaacaacaaaaatgatttttaaaaaactgtcagaatcaatgtcatcagaactctgaaaagtagtccaaggtttacagcaacccagggaatgtagaatagagaaaacagcaacttaaaaatagtaggggagctttgtggtgctttcacttgcccttgatttacttttctctgcagctgggtgatggtcttgaaggtgacagcctatattaccagtgtaggacactgatctcttgctccagaggcagtggagcagaacttgttctcaattgtgtttgtctgttttgaactgtctgagggctacctgaaagactgttgcaagttacttggttttatcttatctaacttggaattctatcatggtggaaaagtggctaattgaagagtacattcctctaaatcattgaaaggcaaatgaacaacccactgtcacttgaggtaagagattactgttgaagcaaacaatatacagaatgacaacttgggaggaaaatctggggagagagattctgtgaggaagtagggtattgaaaagctccccacatacaccaggaaatttagaaaggcatgcacatactcagaggagaacatatgttcagaaatgacctgaaaaaactgcaagctttcacctctgactgatctttgacttagtgcaagcagtaagggaaggctttggcagagttgtaaatgacctggctaagcaccgaaagagggctccaacaaagagtcattgcgcaaagagtgggcaaatatttttccttttttgtttgtttttcatccagacattcaaggaaatccctgttaacacactgggtaaaaataaatgaaaagaatagaggccttagataccacacaatacagggaataccagttttacaaaaaaagtagtttagaaaactcactattcatttcccagagctgctcttaccacatggcacaaaattgggtggcttgaacaacaaaaattcattctctcccagttttctccaggttagacctccaaaatcaaagtgtcagaagggccatgctctctttcattaccacttagtagcttctgctggtatccattgatctttgatattccttggcttttagctgtatcacttcaagctctgtctctgtggtcacatggcattctccccatgtgtttcagtcttaatatggtatgttactcttctaataaggacactgtcgtatcgaatgagggtacaccctaatgccctcatcttgattgcatcttcaaaaaccctatttcaaagtaaggtcatgttcacaggttaggacttcaacatatctttttgggagacaaaattaaacctgtaacagtcactaaacaaaccattacgatccacaataagataagaacaaactgagcaggaggaagaatctgactttaagagataccacattataaaacaaacaaaaaaaaagtacacagcatgcaaataaaaaattatggtccattcccagaataaatgaacagaaactgtccccaaggaaacacagacactggacttaccagacaaagactttaaataaactgtcttaaatattctcaaagaactagaggaaaccatgaacaaaaataataaaccaggagaatcatgtctgaaaaaaagatatcaaataggtagaaattatttaaaaaccatgaattttggacctgaagagtataataactgaaatgaaaattcactagaggatttcaacagtatatttaagcaagcagaaaaatcagtgaactaaaggataagtaaattgaagttattccatctgaggagcagaagaaaaagtaagtagaactcagatacctgtgggatgccatcaagcatatcagcatatgcacaatgggagtcacaataagaggagagagaaaggagtataaggaatatttgaagaaataatgttcaaaaacttctcaaacttataagacatgaatctacacatagaagaagctcaaggaactaactccaagaagaataaatgcatagagatccacaccaagacacattataatcaaaccataaaaagacagagactcaaaatcaacaagagaaagtgacacctcatgttcaaagcctctataataagattaataacccatttctcatcagaaaccatgatctccagaagccagtatgatgacatatttaaagtaatgaaataaaaaaaacctgttagccaagaatcctatatctggcaaaaccatccttcaaaaatgaaggagaaattaagacattcctagataaacaaacactgagggagttcattgctagttggcctgccctacaagaaatacaaaatacttcaggcagaagtgaaaaaacactaaatcttgaagccatataaattaataaagaacactggtaaagtaattacataggtaaacacaaaagccaatattattgtattattggctcataactcctatatgatttaaagaaaaatgagtaaaatagttacaaatctatgttaatggggcacacaatgtataaagatgtaatttttcaaatcctaaagggaggaggacagagatacgggagcaggattttttatattttggaagctaggttagtattaattcaagctatattaacttctttaatgtattacaatatagtttgaattaatactattcaacacttttgcatctttaaattttttcataataaaatttggaaaaataggccagctgtggtagctcacatctgttatcccagcactttgggagggtgaggcaggaggattgcttgaggccaggagtttgagaacagcctgggcaacatagtgagaccctgtctctacaattttttttttaattagctgggtgtgatggcacatttttgtagtcctaactatgcaggagtctgaggctggaggaccacttgagcccaggaatttgaggctgcagtgagccaagatcacacccattgcactccagccggggtgacagagtaagaccttgtttcaaaaaagaaaaaaagacgttaactgtataccacagggtaatcactaagaaaatatacagaaaagggaataagaagaaaaattaaatggtacactacaggtcgggcatggtgactcacgcttgtaatcccagcattttgggaggccaaggtgggtggatcactttaggtcaggagttcaagaccaggctgcccaacatggtgaaactctgtctttactaaaaatacaaaaattcgctgggcattgtggtgcatgcctgtagtcccagctacttgggaggctgaggcatgagaatcacttgaacccaggaggcagaggttgcagtgagctgagatcacaccactgcactccagcctgggtgacagagtgagaccctgtctcaaaatggaaaaaaaaagaaaaaggtacgctgcaaaaacatcaaacagaaaagaaggcattaatcaagagacctaggaaagaaggcattaatcaagagacctaggaacaaaaaagataagccatgtagaaaacagatcacaaagtgaaagaagcaaggccgttttaaaatcaggaattaatttaaatgcaaatagattaagctctccagttaaaaggcaaaaatggacagaatggataaaacagcatgatccaactatatgctgtctataagagacttatttgcaatccaaagacaaaaaatgttgagtgaaaaaatggaagaaaattattccatgcaggatgtaaaaaaagagaactgaagtaattgtattaatattagacaaaatcgacttaggtaaaaaacttgacaagagacaaacaatgacattatatattgacaaaagagtcaatccatcaagaagatataacaatacagacattacacagctagtccccaaatatatggtgtgaaaattgatggaactgaagggagacataaatatttctacaatgttttcagacttcagtatctcactttcaataatggatacaacaaccagacaaaagatcaataaagaattagaggatttggaaacataaaccaaactcctagcagatatatacaaagcaccccacctaaaaccagcagaatacatatttttcttaagtggtcatgaaacattttctgggatagatcatacattaggccacaaaacaggtctcaataaaaataaaaaatctcacgtatcaacagaaagataaagtcacatgaaatgtattctcaggccacaaaaaaatgaaactcaaatcagtaatgaggaaaactggaaaattcacaaatgtgtggaaattaaacagcacactcataaaaaccgatggggatagaagttacagggaaattagaaaatactttgagatgaaaacaaaacatgattcaggattcctttggtgctaaaataataaaattctgctgactgagctaaaaaaatttgtgatagaaaatatcaaaggcagttccccactctatacacaatacccacccccataacttaaataaaacaactttctcctttctagagaaaatcacattggaaacaaagcctctgcaagaagtcctgatatatgtgcttttacaaggctgctaaatattacttcatttttgataccacattgacttgatctattgatgatcattctattgcatttatcatctcaagagcaagctgagtggatacaaaaaaaaatttaaattgaaataagggaagaagcattttcaagatataatttagatgttgtttttttccaaattacaatacagttggctcttgaacaacacaggtttaaactgcatgggtccacttatatgtgaattttttttcaacaaatatattgcaattttttttggaaatttgcaacaatttgaaaaagctcacagataagccgtgtagtctagaaatatcaaacaattaagaaaaatttaggtatatcatgaatgcataaaatatatgtagatattagtctattttatcatttactaccataaaatatacatgaatctattaaaaaaaggtaaaacttataaaaacttacacacacaaacacagactgtacgttcacagtcaagagaaatgtaaaacaaagatgcaatattaaatcaagcctgcataaagttaactgtagtacatgctgtgctactgtaataatttaatagctatctcctgtcactgttgtggtgagctcatgtgtgtaaatatctgcttaaaattccaagtaatgctaatcatctcaaagtgagcagttcatctctctagtaaattgcgtattacagtaaaaagtgatctaaaggtttcttattttttattgtgtttagtgcaatactataaaacttgaatactaccatgggacctatgtgaactgccactagtgatgttgcaagtgctcccaagatgcatagaaaagtcatgacattataagaaaaagttgaattgcttgatatgtactgtagaatgaggtctgaagctgcagctgcctgccatttcagaaagatggtttattttgtaaacagatggtgtaaacttacagtatcaataccgtacagaactgtaaatatttctcttcttcttgattttctttttttcttttttcttttttttttggagctggagtctcactgtcgcctaggctggagtgcagtggcacgatattggctcactgcaacctctgcctcctgggttcaagcaattctcctgcctc[221 bp omitted]ttccgctcgggcattctgggaagtgtagtgcagaagccgttgcaaccttgtgtacttccgctgcaggagggcgaagcagccgtcatctatcccctctgggaggtgagtcagcgcggaacctctgcatctacggcgagctttcctggcctgggcgttggactcgcaggtgcctgccctcgctctcagtgaagggaagtcgcagagggcggggacgacggtttgcttgccctttgtttttagggcggtgcatgggtctccaagttgggaatggctcctggtcgcacgtttggtttgaaggtctcccgggcgctcaagttccctcgccttccccaccttccacacgctctgctgtcttctggcaatataatcttggtagtttcttaatttctccgtttctcctctgtaaagtgagtttcatagtagtacctaactggtaggggtttcgtgagatttacttaagataaatagatgtaaaaatgcgtaggaccgatcctgacacacactgaaaaggtggctggttgttgccaatctgttatttcttcctggagaggagaggcattcagtctctgaaagcttctgtgagcccgcagtgggttctgagctccaggtgcagcgctactcgcccttctctgatctctgcacctcgcgaggctgttcctggattcctaacgtggggggacgggggtgtcaattttctctccatcttttttatttttccttcccttttaaggcatgagtgtgtctcacctccatgtggtgcctggggatgtccactgtcattcatcctggaccagaaacagagtttagatatcttccaacctcctttccttcctcagccttgactaaccggagggctgcagagaggagggtgttgaccccctggctcttggtaacattgtcccaacgtgagaggacttaatatatgctattgctatttctgcttagttggagaacagatttcccacactcattagcaatattatttttcctgctgggcaaatgctcaaatatttatggaataaatgagaggttggattaggcatgtgttcgtgaatgagtaataataaaatttgttaatacgttgagtgccagggtctcttctataggctttatatgcattaattagcttaatcttcagaacaaagataatattgtaattcctgttttacagatgacaacactgatgggtaaaacatttatcttcccaaagtaaaacaacaggaaagagcctgaactgggagtttgagctcaggctgagctcaggcagagtgggttcttgacctttgtgccactctccttcagccctgagaaatgtcagtcccatgggggtgcagtgactcacgcctgtaatcccacactttggaaggctgaggcgggaggatggcttgagcccaggagttcaacagcagcctgggcaacatagtgagactccatctctacaaaaaaattaaaaattagccacacacctgtggtcccagctacttgggaggctgaggcaggaggatcgcttgagcccaggaggcagaggttgcagtgagctgagatcatcccactgcactccagcctgggcaagagagtgagagtctgtctcaaaaaaattaaaaagaggaaaagaaatggtttcacagtttaggcaatgactgggggatgctcaagagtcataataaaaaaaatttttttaaggatttgcagggaagaactctgaggagatgacatttgagtaaatacctgacactgctattaaaataaataaatagatagggtttacattatccacagtctatggattgacccttttatgaatgatttcactttttttttttttttttttttgagactgagtctccctctgtctcccaggctggagtgcagtggcacgatctcagctcactgcaacctcccactcccaggttcaagtgattctcgtgcctcagcctcccgagtagctgggattacagatgcccgccaccatgcctggctaatttttgtatttttaggagagatgaggtttcatcatgttggccaggctggtctcgaactcgtgacctcaagtgatctgcctgccttgacctcctaaagtgctgggattacaggcgtgagccactgcgcctggcctaatgatttcacttttaaggatgaccttgatgttgcttgagcaaagcaaatgaaattaaaaacgcagaagaaattgacatataaagttcatcctctcctcctcccaattaatttaatagcctgagaattttgtagcttaaaggaatcttggagatcaattagtacaatccttgtctgactgtgtgtcattctttgattctgtgtgcatcaaatactcactatattctaggtgcttggggtaaaaagatgagtaatgttcattatctcacaggcaaaacagatgcttgatttactaattataccccaaatgccccagctacgctgaaggcttccaagaggagggattacaagagaaggacagggaagctggtcctctctggaggcagagtggcaggagcaaaggcacgagaggacttgacaacctaggaatgaacaaagtctggaaattcaggcctcgaaaagtggccctggtacatgtagtgagcagagctgagccaggcaccccaaaccccatttgtttttttctactaaatgtcgtgaaatgtcaagtcttgcaaaatcctgttactgagcagagcaggagggtgcaggtaaatataggaccagaacaaagggaattggatattaaaaattgatctctctccctagctttcagaagagaatacattgctctcgtccctactagagtgtttctgcctgaagtaggaggacccacgaacaggagtagctatctgtattgaatgctatcttgtatatactcactgaaacctcttaataaccctacgaggtagatactgttattgtcctcactttatgggtgaggaaataggcacaaagagctagtaagtcagaagagtcaattaggatattaggttcctcatcatctggctccagtatccctcagcagatcattttcagcagttcataccctccaacttccccttctctgatctctaagacatgattccttccatgtcttcatatttctgattagagaaggagacacgattaagagacaggctctggactcagctggattcagatgcagtctcacctcaccagctctgtgaccttgggcaacttaatctcagtaatcctcagcttcctcatccattaaatgggaacgacagtcatcatatcatcacttattgagagcttatataatgtgccacagacagaaccaaggcttttaccccatttaaaaaattgagtcataattcatataccatataattcacccttttaaagtgtgcaattcggtggtatttagtgtatccacaatgttaggttgtacaaccatcactattttctaattgaagaacatttgtatcacccccaaaagaaacctcatatgccctagccatcactctttactatctcttctctcagcccctggcaactattactttttgtctctatggtttagcctagccaagactattcgatttgctcattaatccccaaagcaactgtaaattagaatctgttattagtactacagtatttttcatttaagtgagacagatactgtcaaacttttgtttaaaaaaaagctagcagagacacattttaaattagtatttccttacgacagtgagcacgggaaagggagatacaccattgagactctcctggctacatgaagaaaattcataagtatttataccttttacaaaactgaatgctgatatcaattaaatattataggacaacaaagtagtaagtaatatagccaatcagaattatagacttttcagaggtaaaggtgaatttcataagataaagcattgtacagtctttgaaatctggatgttataaaagactctcttattggaaatgatggcaaaagacatttgcaacaacaattttatgatgcataatatcatctgcttttctgcagcttgcagggaaatcagttatacgagtttccatctgttcacacatttaacccttacaataatcttgcaagaaagcactatttttctcatttgcaggtgacaaatttgaggaatggggaggttaattagcttaaacagagttagtagccatgccaggatttgaccccagaccttgtgaccccagaatccacttttgtagccagtacattctgctgcaagtagctgggattacaggtgtgtgccaccacacccagctaattattgtatttttttgtagagatggggtt[133 bp omitted]gtgggctagggcctgtttctcatggcttctttctcttttcccagttctgccttcccaggaccctgcccttccccagaaggagcaggagaaaatgaccaagtttcaggtgagttgagttttgatttttatctcttaaaatgacatctcttttcctcaaagattagacacttttttttctcttccttgggaaagataaaggaggaaaacaggtatttggaatctgctagttacttgattttcgattggttcaattttttgtttatgtctttagcttttgttttggtagttttattttatcatctttatttcacaagtagtagtgcaaaaattcgtagatatcaaaaaatgggagaaaacctccacattactacattgcatacaaataatctatttcccccatactattttatatgtatttacatattgtatgtcttatatctatacttgtcagtgtattttaaagaactacaatcacattctatatacaattttcttttttcagttaatgttgttactagagttttatatgatttagtgttcctttatgtatttgtctcagaagggttttcattttttgtctaatttttcagaggctacaaaacaaacacacaatgctgtctctaaatagtatttcaatttgcaagactttttcatggggctttaaaaatgcaatatttacttacaaaaattatatatatcttaagtggtcaggtcaataacagttttatatcccacttcgacagttgtataattgcattagcccaccattcagaacaagatatagaacatttatattaccccaaaaaggtccctcctgtctctttcaagtcagttccttactccccagaggcatcctctgttatcccttacccccttctcaccctttccccctgaggccctaaagtccattgtgtcattcttagacctttggatcctcatagcttagctcctacttatgagagagaacatacgatgtttggttttccattcctgagttacttcacagagaataatagtctccaatatcatccagcttgctgcaaatgccattaattcgttcctttttatggctgagtagtattccatcatatatatatacacacacacacacacacacacacacacacacacacacacacaccacggtttcttttcttttgtttttttttgagacggagtcttgcactgttgcccaggctggagtgcaatggcgcgatcctggctcactgcaacctccgcctcccaggttcaagcaattctcctgcctcagcctcccgagtagctgggattataggcacctgccaacatacccagctaattttttgtgtttttagtagagacggtgttt[141 bp omitted]gggttggttccacatttttgcaattgcaaattgtgctactataaacgtgcatgtacaaacacctttttcagcgttgggactaaattgacccaacatttctaggacaatttggtagtatcagtcaagttataaaatacgtattccgtgtgattcaagatttacagtgctggggcatttactgttggaatacttacaaatgtcaccaaattaaatacacaggggttattttttagtagcacacacttttgatgtgactgtggaaaagtagtctatgagattggcatgtgggatggagaaaacgaggaagctacttaaagttcattcgaggccctcacaatccagaacgtcttcctgcctgttctttctacctgctcagtgctgcctctctcccagcagttattggccataagattgagattacatctgcttgatgttgtaggagatggtgacattcaaggatgtggctgtggtcttcaccagggaggagctggggttgctggaccttgcccagagaaagctgtaccaagatgtgatgctggagaacttcaggaacctgctgtcagtgggtgagcacaggcaccttctgtaactgaatatcagccctctggactgtcctgctttcaattatttaagactttgggacgcttaaaatgcttccctgaacttggggatgtgaattttctaattcctcagggacatcttgtctataccttgtctatttttctcaaattgcagttgtgaaatcttggtgggttttgaaatcagttggtgagttacattattattgtgtttaatgaaatgaagtagaaatattatagctccttgtcaggaactgcattcagtgcaacgaaaattgtaagtaaaaacaggaaagaagatgtgataaaagtagataatggttaggatcaaattatctgatcacttgatttcagtgatttacatttatgtatttgtgtaccggatcacaaattaaaaggtattcagacaatagctcatgatcacaattttgaaaaatactacttagagcgcatgaaaatggtggtgttggaattaaaatttttgactataatgcattcactttatatatatgccatttctttttcacaggctatcaacccttcaaactagatgtgatattacagttgggaaaagaagacaagcttcggatgatggagacagaaatccaaggagatgggtgttcaggtgagaaccatggagctctgagtctttgcggggtacagcctagtcctctcctcctcaccacctcctcagccaccagcctggcccaagaccccagaattcatcgccctggtttactgcagcagcttgcacatgaccttcctccttctacctccctccagtccattctccacatagccagatcatgtaagtcagatcatgtcgctccttggctcaaaagccttctgtgacttcccatctcactcattaattccaaaatctctacgagccttcagggtcctatgtgacctggtcacccactccctgtgaattgatttcctatcctttgcttttcactcagttctttccagccacacaagactgctgtgtgtttcttatacatgccaagggtgctttttttttttttttttctttaagacaggtctcactctgtgacctaggctgaagtggtggtgcaatcatggtacactgcagcctcgacctcccaggctcaatcgatcttctcacctcagcctcctgagtagctgggatgggactacaggcacttgccactatgctggactaattttaaaactatgtatatatacatgtttttttttttttggtagagatgaggtctcaccatattacccaggttggtctcaaactcctgagctcaagcaatcctcccacttcagcctcccaaagtgttaggattacaggcatgagccactgtgcccggcatacatgtatttctttctacctgaagccttttgctcttctgtctgcctgggatgttcttacctcatacatcctcttggctcccagcctacttcctttatgtctggtcagatgtcatctcatcacagaaacctgcttttttttttcttttagacggagtcttgctctgtcgccaggctggagtgctatggcgcgatcttggctcactgcaacctctgactccctggaaaactgctttgactaccctgtttaaaatacctatccttggctgggcgtgatggctcatccctgtaatctcagcactttgagaggccaaggtggcaggatcactcgaggccaggagtttaagaccagcctggacaacacagtgagaccgcacctctataaaaaaatttaaaaaattagctcacagctataactgtgccactgcactgtagcctgggcgacagagcaagaccctgtctcaaaaatacatacatacatacatacatacatacatacatacatttaattaaattaaatacccatctctttattctgcctttgtgattaatcatcaatcatcagctgacatattcatgtattacattttgtttacttttctatggtctctttccccattagagtacaacttcatgaacgtaagaattttacctgttttcttttcatttttctttttcttttcttagagatgggggtctggctttttcacctaggctggagtgcagtgatacaatcatagcttgctgcagctcaaactcctgggctgggactacaggagtgcactactgtgcccaacactaatattacctgttttaaaattgctgatccttattgcctttaataggcttggcacgtaatacctgttcatttaatatttgtcgaatgagtgactgaatgagtgaatgaatgggttaatggaccgatgtcagtaacgtcagttaatggactaatggataggtgttttcatttgaatagtactgtaatggctccctcacagatctcccaacctgtggtatctgcgagacttttggtgagagttgcctcatccatacacccagtgacaacctccctgttctgctttcacccctctccttctattctttctcttccttatttcattcccccttttcttcacttcttccttcatttatctttaatttgaatatacatcataaatacctaaaatacactaattaaagtcattcctacttgatagaagcaccaaaacgcaaaaactaaattaaacaaacaaaaaaagcaaaccaaaagcccaggagaatctctctgcttatctgagagagacaggccctggattttgtaagtagctggagtagtaaaatctttccaatcttcttatcttttattttcttgtatctccatgctccatgaacgttgactgcattgcaatcaggaatgttggatgctgacttctttgactgactgcctcatttttaaaaattttctttttttgtttttgactgcctcatttttgtgtataaacctaaaacttgggaattatgatcccagttattgccattgtcctttttttttttcttaacaggtagcttcttcccaacttcttctttgcctccttagcaaatcttgactgtttttgttttttttttctttttttgagatggagtctcgctctgttgccaggctagagtgcagtggcgcaatcttggctggctgcaacctctgcctctcaggttcaagcgattctcctgcctcagcctcccgagtagcagggactataggcgcatgccaccacacccagctaatttttgtatttttagtagagatggggtttcaccatgttggccaggatggtctctatctcttgaccttgtgatctgcccacgttggcctcccaaagtgctgggattacaggcatgagccactgctcccggccacaaatctttactttttttttaatttttggccaattttttattgaaatatatacagaaaactgtacaaattgtaaatgtatagctccctaaattttcaggaagtaaaatggcttgttttacagctcttttttattgaggtaaaatttacatgtgcacaccttaagtgtgcaatttgatgagttttgacaaaaggatataactatgtaactcacagcccttggaaaactgaacaaatctgacagcgtattctaccctcacctctctttattttttggcaaacatcagaattttttagggtttcacattctgcttatccacctacgtacccagctccacctatacaaaatattcctgaggtctattttcactggacagaagtacaaattaaagggcatcttctccctcaaggatcaatgaaacaaaatctcacagagtatggtgctaagtggatctcactgtcttcacttctcattgagagagttcacaggcagagaataaagaggtgtcactaaaggactatttcagaacatagttactcttctgatgttatgttcagcctacttataatttttatgacacctgtgttagttat[137 bp omitted]catggtgaaaccccatctatactaaaaaaaaaaaaaaaaaaaaaaaaattagccaggtgtggtggcaggcaactgtaatcccaactactggggaggctgaggcaggagaatcacttgaaccccggaggcagaggttgcaatgagctgatatcataccattgcactccagcctggggaacaagagcggaacttcgtctcaaaacaaaacaaaaaccttagcaccttaaaacaatgaacattggtttatagtttctatgggttaggtatatgggagcagcttagcttaaccctaagtgagggttctcactccggatctcaaaaagctgttaaagagtgacggagctgccgtccccggaaggctggactgggactgaaggacctgcttccaaggtgggctcgttcacatggctgtggcaggaggcctcgcttccttgctaagtgaaccattccctacggctgctgaagtgtcctcaaaacatggcagctagtttctcccagacccagtgattcaggagagtggaagatagaagccacagtgtttttatgacctagcatcagaagtgacagatcatcacttctgccatattctattggtttcacagaccaaacttgatacagtgtgggagggggcttcaaaagggaatggattccaatggggagtgatcactggggaccatcttgtattagccatttaggtttatcagaaaattcagtcaaaccaagtggcaacaattatcaatgcctttactcctatagggtgtgtcagctatgggaataagttttctaattctttttcatttatcatgttcactaattgaatattatatacttagaacctcattgaaaagaaggagaattctctcaaatctagctcatcaaatgtatgtttaaggactaaattaaggaaataatggtactatcttatgggttcattctcaagacagagaagatatttttctatattctcttcacttttgccaaggatgtcccctctttctttctttgagaattcttggcatcactaaataatccacttgtgaatgctgaaggagagattcaggcttttgtaaccatttttgggctttatcatatacagatgcaggttgtacaatgtaaccatgattctgaggctcacatatagccaggattttgtagattttatacatctgccacggaaaagaggagaggatttttttttttttttgagacggagtctcactctgtagcccaggcttgagtgcagtggcacgatctccgctcactgcaagctctgcctcctgggttcacaccattctcctgccttggcctcccgagtagccgggactacaggcgcctgccccc[141 bp omitted]agccaaagaggagggatttttaagtgattattcttatggacaaggaggtaaagtttctcctctacaacgtctttctagggcatctttttgttgctctgtagcctgtgtatttgaccacatacataagtcttggtattggccaggcatggtggctcacacctgtaatcccagcactttgggaggccaaggcaggcagatgacttgaggtcaggagttcaagaccagcctggccaacatggtgaaaccctgtctctactaaaaatacaaaaaaaattaatgaggtgtggtggcatgcacttgtagtcccagctcctccagaggctgaggcaggagaatcacttgaaccccagaggtggaggtttcagtaagccaagatcgtgccaccacactccagcctgggcaagagagtgagactccatctcaaaaaaaaaaaaaaaatcctctcctcttttccatggcagatgtataaaatctacaaaatcctggctatatgtgagcctcagaatcatggttacattgtacaacctgcagtctcaaaaaaaaaaaaaaaaaaaagtcttggtatagctctaaatgagtctcattaacattttgtatatagaagccagccttttttgt[174 bp omitted]ggtggcaggcgcctgtagtcccagctactcgggaggccgaggcaggagaatggaatgaacccgggaggtggagcttgcagtgagccaagagcacaccactgcactccagcctgggtgacagagcgagactccgtctcaaaaaacaaaaaaagagaaaaaaaaacaatgataaagtcaagctgaactctccactggtttattaaggtttcccaatgtggtcaacctgtgaaatgtttttttatttctgaacaaatgttcagttgtcttcattttcatttctgagttctctttatcattctaggacacaagaatcaaaatgagatagatacccttcaagaagtaagattaagattcctttcatatgaagaccttatatgctggcaaatatgggaacaatttacaagtaaattaaccagtaatcaagacctaataataaatcttcaaggcaagaggtccaagttgctaaaacaaggtgattccccctgtcaggtgtggacaggagaatctagtcaggtctctgaagatgagaactatgtaataaagctacaaggggagagttcaaatagcataaaaaatcaagagcttccattgaggaccacctgggatttctggaggaaaatgtatctgagagaaccacagaattatcagagtaggtgtcagcaaattgatgtaaaaaataagctctgtaaatgtgatcattgtgttaggcaaagaattgctcatcaacatgatgatcatggagtacacaaaagagagaaagcttttagccacaataattgtggaaaagactgtgtgaaggaatcatcccagcatagcataatccaatcaggagagcaaacctctgatgaaaatggaaaaggcttaagtgttggctctaatcttgaacttcaccagcaactacacttaagagacaagcctcatgtaaatgttgagtacgggaagggcataggttacagctcagggcttcccaggcatcagtgtttccacataggagagaaatgctataggaatggtgacagtggtgagggcttcagtcagggctcacatctgcaacctcatcagagagtcagcacaggagagaacctctacagatgtcaggtatatgcccggagctccaaccagaactcctgtcttccctctcatgagcttactcacccaggagagaagttgtgtacatgtggcaggtgtgggaagggcttccatcatagcttagattttgacattcactgtgtagacagtgctggagagagagcctgtaaatgtgatgtatatgataaaggcttcagtcagacatcacaacttcaagcccatcagagaggtcactctagagacaagacatacaaatgggaagtaagtgacaggatatttaataggaattctggtcttcaccagagagttcacactggagagaaaccatataaatgtgaggtatgtgataagggcttcagtaaggcctcaaatcttcaagcccatcagagaatccacactggagagaaaccctacaaatgtgatgtgtgtgataagaacttcagccgtaattcccaccttcaggcccatcagagagtccatacaggagagaaaccctacaaatgtgacacatgtgggaaggacttcagtcagatctctcatcttcaggcccatcagagagttcacaaaggagagaagccatacaaatgtgagacatgtgggaagggctttagtcagagttcgcatctccaagaccatcagcaagtccatactggagagaatccctacaaatgtgatgtgtgtgggaaaggcttcagttggagttcacatcttcaagcccatcagagagtccacacaggagagaaaccatacaaatgtgaagaatgtaggaaaggcttcatctggaactcatatcttcatgttcatcagaggatccacacgggagagaaaccctataaatgtggcatgtgtggtaagagcttcagtcagacttcacatcttcaagcccatcagagagtccatactggagagaaaccatacaaatgttttgtgtgtggtaagggctttagtaagagttcgttgtcttcagattcatcagagagtccatgatggtgatgaatctattaatcatgatgagtgtgataggggtgctcttcaagacttagacttcccattttcctcagaaaatccacacagcacagaatatttataaaatgtcatgttttaagaattcatgagctgagtttttatagttatctgaattccattgaagaaaacctatttttgtatgaatatgaccagtttcaagcagagcccaaaatgtcacagttgtcaagagaacacacaacagagaaaccctataaagaatgatacaatatgtttcaatcagaaccttcacatccaataagcaatatgcaggagtgaagccttcaaaatgataagtaaggtcagaatttagcaaaagtataatgagggacatgacaaaatctgtgtccactagaatctaagctccatgcaggaacattgtttactgctgcatgatcgtgaccttgaacaagtacctaagaaatagtggcttccctggaattgtttaacttgataggaaaaatctatcatatataggacatatatttgaatattttagtgagctcagccccaattcgtcattataattgtactgggaaaaggattcttgcaagaagccttaaaatgaattcaaggaaatgacatttaattaaaacacataaaaccaagcagtctacaatctgagtaatgtttttgcaattggcttctgtcctcagttcagcttcattttccaagcagtataataggccaaagtttctatctgattatttaagactttttccatacagtgtacagctgtgctatgtttctttggcgggggcttttgctatctttctttttgggagctagtgtgatagaaacagactgaatgaagaaaaaaatcccaactggtttttagttccataaagcttcatgagaaaggttttgcaaaaaaggggaatatcatatggcatgcattttagatgttaaactaagctgttaaggacacagcattttggacaacaccccatacttctcagacatcattacacgttatgcagtgtgtaatgatcaaatcatagtaattggatgaagggtttactcaggtgtatatttagtggaggtgggagaaagtttcccactgttgtttttttttttttgtcctggaccttaccttccaggacaatgaatacttaagttccatgatacctcatttcatgctaccatcagaaatacagggccaataaatgaaaaagaaaaaataaataaaaaagataaaaacaaaaaaagaaatacagggccaataatgctttgcttcatcaccaccagattactagggtgggctgctggagcacatggttgtttaaatcaagatgttttcaattgtgagaaatggaaaatcacactccaactagctggaacaaa[136 bp omitted]cagcctctactaaaaatacaaaaattagtcgggtgtggtagtggtgcctgtaatcccagctactcaagagtctgaagcaggagaatcgcttgaacccgggaggcggaggttgccatgagccaagatggcgccattgccctccagcccagggggccggtatgagactccatctcaaacaagacaaaacaaaaaacaaaaagaatacaggtaggacaggaccaggtctcgttgaaacagggctctgggtcaattcttctgtgattccctcacctctgcccttctggttgagttgattcccacatttgttcattccaacctactgaggaaatttacttaaagaatagatgctcagttaacattctcatatcacacactcccttttctgtgcacttctaaagcagttattttcggaacctctttttgctcttaatcatgtagagacttttcattttcctaaatatatcatacctaaacaaataactcatagaggtactgtgggttatggtttgccatttgaaccatgcatcaaccttctggagaatcttttaaagtatatacatttttccagagtaaaattaatttttttctaaaacacgtgaagtagtttttattaatatattaatagttgtatatatttatgggatgcacgtgatattttgatttgtgcacatacaatgtgtaatgatcaaatcatggtaattgggatatgcatcacctcaaacatttatcatttctttgtgttgggaacattctaaatcttctagttattttgaaatatacaacaaattcttgttaactgtagttgccctactgtgttattgattagctataataaataagttctagtgttactgacactgttctatctgatcatatttttgtacccattaaccaacctctcttcatccttccctcacccctatccatcccaacctctgataaccaccattctaaatcacttcctccttgagatcaatatttttagttcctatataggaatgagaatatgcaaaatgtgtctttctatgcctggatgattccacttaacacaatatcctctggttccatccatgttgctgcaaatgacaggagaaagaaaatgtggtatatacacacaatggaatattatccagccattaaaataataaaatcctgtcatttgcagcaagagattgtctgatttttgtttgttttttatttatttatttatttttttgagacaggtctcagttgaccaggctggagtgcagtggcacaatcctagttcactgtagtcccaacctgccagactcaagcaatcttcccacctcagcttcctgagtactagggactacaggcatgcaccaacatgcccagccaattttttgtaaagatggtctcaccatgttgcccagattagtctcaaactcctgagctcaagctattttcctgcctcgacatcccaaagtgctgggattacaggcatgagccactgcacctggcctgaataaagaattttatctatatatacttggtctaaacagaaaaagacctgcaaagaaatcatgaacactaacaaagtttgttatgtgcattcatgttagttggcaactccaaaactacttgccaggtattggaggactgaacagatgcataaacatactgatgatgctgggggccaatttctgactcttggagaaagaagtaaatatggaatgggaaaatcccttaggaagaatcctgcaatacttatttaaaatgagaggggtcagtattttacacagacacagacacacacacacacacacacacacacacacgactattatcccaataatgattagtatgcacagcacccagatcttggtttctaagtatcattccccactaaaagcaatcagagctctacagaatctgtggctgaggcagggaatatacaagataaacctaatatcttactgtaccagaaaacaaaggttcatatggatgacagacaggtagagagacatgggggtaggggaaggaaaagctcttctaacaaacagtaggatgccaattactaaaaataaaaggaatgacggagtcagaaagtcatattttgcagtcatcacagtaataactgattcagacaagaatcatcaatgaacactaaaactagtgggtgaaagacgagatgataacatagtctcaaagatcttcccacaaattgcttattaatttcaaagccaaaatagcaattttttagtggaaaaacctaggagacaccagttcacacaagttatcaacgctaacgccaacaaaacacatcatgtgtttcctattgtgatgcactgacaagtatgcattagtcatgcaatactcaatctacaaacatttaacttgaatctaatcatgaggagtcaaactcaaatttagggttgttctacaaaatagcttgttgtcttcaaaatgctcatttcatgaaagacaaaaaatggctatggaactgatccaggttgaagactaaagaaacatgacaatgaaatgcaggcatgatacattttagattggaccctgaactagaaaatgctataaacattataggacaactgtggaatttaaataaactctgcagattaggaaacattactgtttctttttctttttttttttgagatggagtcttgctctgtcgcccaggctggagtgcagtggcatgatcttggctcactgcaagctccgcctcctgatttcacgccactctcctgcctcagcctcccaagtagctgggactacaggtaccaccacagtgcctggctaattttttgtatttttagtagaga[137 bp omitted]ttacagattattttactacccccttgattgtagataggcttttgactgtctcaacaaaccgaggcagaagtgatgttggaacttccgaggcgagattaaaaagggtcatagtatttgtgctggcttttatctggatactagctttgagccaccatgtaatgtccagtttctgtgaagtcaccatgctgaagaggtcacagagagatagaaagacatgtctgagaaaccaaagctgtgtcattctctcagttcaggcagtagatgtggaaatgaacaggtctaactgcaatcacattagagaccccaagaatatgtgggattcttttgtattattcttgcatcttttcttaatgtttagaattaattcaaaataaaagttttagaactttaaaaaacattacaaaaatgttaaaaattactacacgagcccccttaaagtaacaagatcatatgtgtacatatatacgcatatcacatacacatatatacacactcatacaaaatcctgtctctgcccactttcctaaacatattctcagtaactaccaacgtcaataattataaatgtacctcctctcatttcactctgtattccactgaatggataagtcatcaaatattttgtcaatccaactgataaatgcaaagtttgctattatcaacaatgcaactgtgaacatccatttacacacatctgtaactgcgtgtctcagtcttcaaatgcatcttaaaagttttctccctttccttcctgatatggtttggctgtgtccccacccagatgtcatcttgaattcccacatgttgtgggagggacctggtgggaggtaattgaatcaagggggcaggtcttttatgtgctgttctcatgatagtgaatacatctcacgagatctgatggttttagaaaggggagtttggccaggtgcgatggctcatggctgtaatcccagcactttgggaggctgtggcgggcggatcacgaggtcaggagttcaagacaagcctgactaacacggtgaaaccctgtctctactaaaaatacaaaaattagccgggagtggtggcacatgcctgtaatcccggctattcaggaggctgaggcaggagaattgcttgaacttgggaggggaaggttgcagtgagccgagatcgcaccactgcattccagcctgggtgacagagcgagactctgtctcaaaaaagaaaagaaaagaaaagaaaagaaaagaaaagaaaagaaaagaaaagaaaagaaaagtggggcggggggggagttgttctgcacaagctctctctttgcctgctgcaatccagagactctgtctcaaaaaagaaaagaaaaaaaagggggggtgggacttttcctgcacaagctctctctttgcctgtcatccatgtaagacgtgacttgctcctccttgccttccaccatgattgtgaggcctcccagccatgtcaaactgtaagcccattaaaccctttttcctgtataaattatgcaatctggggtatgtctttatcagcagcatgaaaagaaagagacacagagacaaagtatagagaaagaaaagtgggcccaggggaccggcactcagcatatggaggacccgcgccagccctggtctcttgagttccctcagtatttattgatcattatctctaccatctcagagagggggatgtggcaggacattagggtaattgtggggagagggtcagcaggaaaacatgtaaacaaaggtctctgtgtcataaacaaggttaagaaaaggtgctgtgctttgatgtgcacgtaaacaaacatctcggtgcattaaaaagcagtattgccgctagcatgtctcatctccagcgttaaggcggttttctcctatctcagtaaatagaacatacaatagagttttacaccgagacattctattgcccaggaacgagcaggagacagatgcttcttcttatcacaactgcaaagaggccttcctcttttactaatcctcctcagcacagaccctgtatgggtgtcgggtgttgggctgggggacggtcaggtctttcccttcccacaaggccgtatctcaggctatcacatggggagaaaccttggacaatacctagttttcctaggcagaggtccctgtggccttctgcagtgtattgtgtccctgggtacttgagattagagaatggtgatgacttttaacaagcatactgccttcaagcacttttttaacaaagaacattctgcatagccctaaatccattaaacattgagtcaacacagcacatgtctctgcgagcacggggttggggctagggttacagattaacagcatctcaaggcaaaagaatttttcttagtatagaacaaaatggagtctacttctttttacatagacacagtaacagtctgatctttcttttccccatagtaaaagctattggatctttgtttgtatatgtgtgcacatatttagatatgtttatgtgattatattgttacatgtatgtaacatgtattatgttatgtgttggtctagcatgataccaaatggccttgtaagtagataattataaattaggtacaaatgcttttcaagttcacacagatcttcagtaaataaaactggttttaaaatcattagtaagataaaaatgtcttcagaattgtcagcatacatttttgtctgggcaaataagttttatagttttatagttgccttggctaaatgttttaaggtgtcacagtttggcacaaaggttctgagactataaacccaactgaaaacagagtaatctttgtgtattttttttgaaaaataaaactaatttaaaatttttagtttaatgaaaacagctaaatcttctgagttattggcaaaatgcccagtgtttaaggttcttacttagatgtatacctgatattcagattttaaaaatggttaacagggaaataactttaaataatcaccagctttatgtagtatctcagttttcagtactaatctagataagctgttaaaaatgagaaaatatcgagtacatatgagataaatgcttatagactttttgtgtaatttaaaaccctaaaaactttaaattaaataatactcattcaccctttctactttcccatatattatggcacagaatggttgatgacagtgtaaatccacgtaataggtcaagacctctatgaattgaaaataaaatgctactaaaattctagagaaaccaagggccagaccaacagctagccaaaaagtagacagtaactcatgacgtgctgctaaccatccattcatctgtcagactggctggaatcagaccatagacgcatcacactcgggtgaaggcagctcctcctcaacctgatacctcagacaatcagactgcttggtcatgtaaatcaagagaggacctaaagctatttattaaagaaaaatcatacaaataagtaacacccttctgttaacatgaattgttaatgaattgtacagtcgtaactacattctttatctttgctaaaactaacctttttgctgaatgggcatagatggtgactttcctccaaaataaaaggctgttgggtctgcagggagctacccctttctttaatcacaggcttgccatggtgcatacaaactgctaacctgagcacttgagtatttttatacttggagtaaaaatacttacctgtttcccttctatgattagagtaccacttaccatgagttccctgcctctgagaaaacacagaaacgtattttccttctggttcataaacaggttaatgccacccccactacaggatatgccatagatgatggcatatgatggttgatggcagtgtaaatccaggtaatgggtcaagacttctatgcattgaaaaacacagtaacagtacaccccacactatctcccacgatatgggatgactacctcttcaacaatgtggccaaacccttggactgactaataacatgtgactaggatggcacaatcaaaatagcatccacctccataacagagcctcatccttccccctggggtttgctatgggtctgcggcactcatggttggccttactgttggggatcagccttaataccacctgtagggtacccgaagtccagtggtgacaaaggaatgagaagagacaggttaagtgttcataaaggtgggagccagggggccagagcaaatcagaggctgcaaaggcccggagctgaagtctctacactatttattgaatatgatcacttagatctgagaagcagatgttcagggcgaaacagtgaaagggaggcagtgcattatatgcgtgatctatagcagtggcggtttaagtgaatctcctttgtgctcagtgtatctttaacttatcggagagtagctggtgggagcaggcttaactaggagcttgcgtatctgtctacatttcaatgtcttaaaggagtgacttttttcctgaacacagcgtttacagataagagagcaggtctcactctgagcatgggaacatgatggcaattaggaggctttcctcctcagaggcctcttgtggctttccacaacttattgtccgatatttttatggccaatttatgcaggcactccacaagcccttttcccagcacttacaactggaatggtagatgcacctaggggcgcccttccctaccaggatgtatcctttcccatttagactctctccatgccaactgggaaagtgtaaaaggcgagacgatcccatcaaaaataggcatcaaggtggttgtacccagtagtcctttctttcccccaggcagtggccacagatgtaaaattacaaataaaagacctggttaaacaaacggctgctacctttaataatatccatcatgtcatcccctttctcgctgaaaaaccctcacaagattagacaagtcgccctgcacaaccacatggccttagatatcctgactgcagcacaaggcagcccttgtgcactgattaagactgaatgttctgtccgggagcagtggactacagtgcctgtaatcccagcactttgggaggctgaaaagggtggatcgcttgaggtcaggagttcgaaactggcctggccaacatagtgaaaccctctctactaaaaatacaaaacttagctgggcatggtggtatacacctgtaatcccagctactggggaggctaaggcatgagaattgaacttgagaggcagaggttgcagtgagccaagattgtgccactgcactccagcctgggtgacacagcaaggctgtctcaggaaaaaaaaaaaaaaaagactaagtattgtgaatatataccacattattctcacactatgacctaagctatgcatacactggacatccatatttctgatacagatataggatcctctcccaggaccctttaacagtgtggtccagctgacttccttataaaagactttcatatacagtatggttggtattcttctcattgtcctcatcagctgctatggattttactactgttatacactgaggacagactttctcaaaagttcctaggtcctcagtcctcacactgtaaggctccagcaagttcctgctatagatctgggaatgtggatatatttccaactccaagtgaatagattccattctggtacttcccaactatgccccctttcagcaggaagcagccagattaactgcgttgcccactttccataaaaataggatgaagtttgacagtggggaattcttacagagtactccagctttgaaatgcattttaaaacttttctccctttcctccccaatctcagaatgtggccttatatgttaaaactcttcatctctccctttcccacgaggtacttcatgcacagtgctcacttgtataattgtgcttgcttagaaattccaagcactaattttaaagcaaaacagacacagactaaataaatcagctgcacaatcctcccacttaagggcagttatgaacagttcatccaccactcctgggccaaagtcaagaagatgcaaaccagacctccaaatgggtgactgctcaagataaaccatcagaagaagacatgcaagacctgcacccgactgcaccgctcccacgtatttcccacaccaagttttccctcttaaactccttcactcagcccaaaaagttggaatggtcttttaaggtatgagcctggccatttcccaattactaacatttgattagtaaaactgctttccttttactacattttgcttttcatgttttcagcctttgagtagcaagcagctggacttaagccagttacacatccataacacaggattacatgccatataatgagataaaacaaacaagatttagctataagggattttcatttatgcataactttgtttcacttttactttggtaaaattgatgtcactgtaattttttgaaaagttaaaatatcatcccaaccttccatgccacagtaaacaattgttagcatattaatatccttctattatttctatgcatataatcacatcattaggtggacatacttctattaattggataatcccaggaagggtctaacctagttttctcatgaataatgtcttctctagtcattacagacctctgatcatcttaatggctgtatattataaggatatatcaagacttactcaaatattttactttttcctttttgaattcaggataaatatccttgtgtacaatctttctcgcttttgtcacaatctcctaagtgaaatttctagtgctaggactgccagggcaaagagtatttattgtccactaataccaagaggtcttaagcatagaatgctgtgtaagtggtaatccatctaaatcattacactgaatacaatttcaaggttgggcacagaggttcacatccataatctcaacacttcgggaagccaaggtgggaggaatgcttgaggccaggagtttgagaccaacctgggcaacactgcaaggctctattaaacaaaataaataaacaataagatacaatttcaataaagactcaacaggtttcttgccctgccacttccttttaaggggataaatgtgacaaattaacatgcctgaaatctgccaaagctccttctaaagcggcctacatggaggaaagactacacatagaaaagcaacttgacctgaacctgaatgaaaataatgaaaggaaaccaagtattaacaattcaagtttactaagaaactttttgtcatcagtaactacttttaacactttcagagttacagtacagcttagtgtccaaaaattctaatcatgtaaattgcagggtcacattagataaaaacagtattgttcagtctataaactgacactaaaaatcatactgtacacaactgatgatacactgtacaaagaactaaggctgaaggatgggagccattcatgtcttttttccaaatttgtgttagtatggatggcagtattatatacttttcagtacttactgaaactaacgttattaaggctacttgcaggattccttttgaatataaattaatataaatttagagtagaaaacagactagaattttcaagtatttgtcctaattataggtattttcttcactttcttcagtaattgctgggccctattatgagccaagcacaattctacatggtagagatagagtggtgaaaaacacctccttacatagaggttacattttagttgacatccattttttctgtcaatcatacttttgttaaaggaaggcctctctcctgtgcagactccgacaagacttttctgctgtgttacatcttgagaaccgggacacctggtactctgatataaacactgatcatatttacagaacaaagttttctcgcatctgtgaaatatgacgtttgtaaagaattcatgtcctaaccaagtctaaaacacagcatttgagagacttctttcctgtcaagattctttgaagcttctagttttaaaggaacttttcacaatcatcagcatggacttcccaacggagacaaagatgtgagctctaactgaaggctgaaccacacctctcatttctacagattccctccagtgtggactctctgatggtagatgagatgtgacctctgactgaagcccttacaacagacatcacatatgtaaggcctctctccagtgtggactctctggtgtgtgtgaaaatgtgaggcctgactgaagcccttcccacactgctgacacgtatagggtttctctcctgtgtggaccctctgatgggcactgagaccagcactccaactgaattctttcccacattcctcacatttaaatggtttctctccagtgtgaattatctgatggacttgaagatttgacctctggctgaaggccttaccacaagtgtcacatttatatggtttctctccggtgtggactctctgatgggcttgaaggtgtgaggcctgactgaatcgcttctgacatgcatcacacttgaatggtttttccccagtgtggacgctctgatgggcttgaagatttgaagcctgactgaaacccttaccacactcttcacatttgtagggtttctctccggtgtggactctctgatgattgtgaagattcaagctccaattgaagcgcttcccacacacttcacatttgtatggtttttctccagtgtggactctctgatgtgcttgaaagtatgaactctgactgaagcctttcccacacacgttgcatcgaaatggtttctctcctgtatggaccctctgatggctctggaaacttgaggctgaactaaaacccttaccacactcttcacatttatatggtttttctcctgtgtggactcgttgatgactatgaagattaaagctcaaactaaagcacttaccacactcatcacatttgtatggtttttcttcagtgtggactctctgatgggtatgaagatttgagctacaactaaagcgtttaccacaatccccacatttatatggtttctctccagtgtgaattctttcatgggcctgaagatgtgatctctgagtgaagcccttcccacacacctcacatttataaggtttctctccagtgtgaactctgcaatgaatgttaagatctgtgctacgactgaagcccttcccacaactgtcacatctatagggcttctctcctgtgtgaataggcaaatgagcataaagatgtgagctctgattaaagctcttaccacactcgtggcatgtatagggtttctcccctgtgtggactctctgatgagtttgcagatttgagctctgactgaaacctttaccacattcatgacaccaatagcgttttttcccagtacgaacactttgttgaacaggaatacctgagctataactggtgtccttctcatgtgtactacacgctggagacttctttcccaagtgtacctgtttatgaagttcaagactggagctatcattgaaggcttcttcacattcattaccctggtaggttttctgtcctgtgtgaatactacgctgggtaagaggtgatacctttagggtatctttaccacaatcactattgctatgaactttatctcttttgtgcactatattatcatcatggtggtgtgaaatacaactgaaaatgtcaacatatggagcaaatatacatagtttgtttttcatctgagtctgcttacaacttctctgataattctgtgtctcattcagatatattttactccaagaattcggaactttcccagttggaaattcttgattttcaatgatactggaatgatcccctatgtgattcactagacagttgtcatccacagaagcttgaatagattctcctgctcccacttgacagggggaatcatggtgcttggggaactgagagctctttccttcaatatttatcatggagtcttgacttctggctaatttgctcgcaatgtgtctcttgatttgccagcatgaaagctctcccagtgaaaagcaccttaatcctgctttgtgaagagttgccatctcattttgattcctgtctcctgaaaggatagagagaataaggaataaaggaccaagagactgacattagcaaagtagagaattaagatctaagctctcattttccccatggaaacgtcaaaaaaacaactagactggctgaaataaatttataggaactctgaaaagcagctgcaaccaagagaacaccaaatgttttaaaaagccatatttaagatagaaaatttgagatcagcccagggtatggttaaggtgtatcttgggtcttttctgagtatgagtcttgctgcctgtgtgtattctccagtatacacaactccaaagtgaatgctttgtccagatgtttccaaattttacacatagttccttcggtatcaggctttagttcatgatggaaactttcagcttatctttaccatcacagattttcctggattttatttgcctctcgaaacacagaactacagatctaagaataggacaagaggtagaaaccagccaactgcagaacaacaaaatgatatctcagtaagtacttagaaaggaaaaattgacttctttgcctataagaatggtaaattaaaagtcacctcttctttggctacagcaactgaatcgtaagtagcaactacataaatcaggcaaaatatatgcctcaattataggctctcattatacaacctgcacatctagaaacatgctcaaaataactgatagacaaatccatatttatagctggagatttcaatacccctttccaacagctagtaaaccaagtaggaagatatgtggtggcactcatgtaactgagtccgtgctgtgaaagggacagctgccctggccccttgggggtcagaagtcaccatgccaagggctgtgtgaaaggtgctaagttccactgagacccaagctccagtttttgagaagccaaaaggagggagcaccaggcttccttccaaccagtggtgctggtatcctccaagtttcttcctccaggccacctgtggatatgccatccagaaaccagtccagcccagccaagatgatgacctgtccccttatacgctgctcaaagactaccagaactttcccaggattgagagggttgatgacattgggaaaagacacttgtctttggaaatggccaaccaggagaagccaaaaattaagccagaatagttgataaaaaaggacatggcaagccctgaggacaccagctccacagaggctggaattatcgacttgaacatcaaggcccacagttttgttttgttttgttttgtttttttgaaatggagttttgctctgccactcaggctggagtatagtggcatgttctcggctcactgcaacccccgcctcctgggttcaagcgattctcccacctcctgggttcaagcgatcctcccacctcagcctcccaaaatgctgggattacaggcatgagccactgcacctggccaagatctgcagttatgaaaaacacatgctgacatattgaaaggacaaagcccacaaatgctatctgctgataagcatcaaccagaggaaaaagatgctcaaaaacctccacaaaacctattatgacaactctgggaagacatgcagggaactggggactgaagacacctttcccctctgaattaccaaacagcccactgaccgtcgcttctgactaagaaggctctgtgaattcaggttttccagaatgtgcaaaagctgaagaaacaaaaaaggtcttagctgcagcagcatcagcagtcagaaaacaaaacaaaacaaaaacaataaattatataaaaaataaagcaaaacacaacaaaaaacaagtaggtaataagtgaagatacaggcttgaagcaatattatcaaccaagttgactacttggtctttctaggacactctatccagtaagagcagaaaatgttattttcaggtgcacatggaacatactccaagacagaccatattctaggccataaaacaagttctaacagatgcaaaaggagtcaagtcatacaaagggtattctaaccacaactgatttaaatcagaaattatgaacagaaacatctctgcaaaatcttcaaatattcagagaataaataacatacttctaaataaactgtggatcaaaaataattcaaaacagactttataaattgagtgaaaataaaaaaccaatatatcaaaatttctacttagagcaaaatttataaagcagaaatgtgtcatagaaactaaaaacacaagaacaaattaaacacaaagtaagcataaatagaaaataagaaaacaaatagctagttctttggaaagaacaataaaattaataaactctagcactcatgataaaaacagaaagaagatacaaattacaaatatcaggatgagaggtgacatcactatagatcctgtatatattattaaaaggataagggacttatgaactttatggcaataaatgcaacaatgcagatgaactggacaaatttcttgaaagacacaaaataagtttacttgagaacatacagataatctgaatagcccttatctaccaaagaaacagaattcatacttacaaatatttccacaaacaaaagttcaggcttatagggcttcatccatgaattttaccaaacatataaggaagaaacaataccaatgctagacaaactcttccagaaaaatgaaaaggtgtaaatacttctcaacacattttaggaagccagcattattctaacaccaaaataagacaatgacattccaagaaaaggcaactacagactaacattcctaatgaacatatttataaaattcttaacaaaatgtgatcaaatcaaatctaacaatgtataaaaaggataaatcaagacaaagtagtgattatctcaagaatgcaaggctgatttagtattctaaaattagacctaaatgcttccctcagaaaatcaggaacaaggcaagtatatccactctcacaacctttattcaacattactgaagttctagtcagtgcagtaagacaggaaaaaaacaacataaaagaaataaagatcataaaggaaaaaatgagccagataaataatttgaaatactgattttaaggaagctcaatgagatacaaaagaaatttgaaaagcaatacaaaaaatcaattcaggatatgaatgagaaatttaccaaagagaaagagataggtatcttttttttaaaaagccaaacaaataaaaacttctggaaatgaaaaaatcattgaagaaattacaaaatacagttgaaagcttttacaatagactagacaagcagaagaaagcatctcggtacttcaagacaggtcttttgaattaatctagtcagacgaaagtaaagaaaaaagaataaggaagaaaaaacaaagcttctaagaagtatgaaactacataaagcaaccaaacctatgaatcataggtattcctgagggagaagaaaaagtaaaaagtttggaaacctagttaaggaaataattgaggaaaacttccttaatctagcaagagctttagatatccagataaaagagatctaatgaactccacgaaaatacattgcaagatggaactcaccacagcatacagtcatcagactaaggtttatatgaaggataaaatcctaaaatcagcaagagaaaagtgtttagtcacctataaaggaagctccatcacacaattcaacttgtagaaaccttacaagccagaagagattggattctattttcaagttgcttcaaaaaacaaaaaaatttgtatcctactagaataagctctataaatgaaggaaaaataagccttccccaaataaacaaatacttagggagtttgtcaccactagaccaggtctacagggaatgctcaagtgagttctaaccatgaaaacaaaaggttgatacttgccatgataaaagacacaaaagtataaaacttgcaggccttataaaataattacacaaagaaagaagataagtcaaatggcaacataactcatcttaccgataaagacacagactgaaggtaaagcggtagaaaaagatattccatgcaaatggaaaccagaaacgagcaggagtagctatttttatatcagataaaaaaagactttaaatcaacagcagtaaaaaaagacaaagtcattacataatgataaagtgatcaataaacaaataagataacaatcctaagtatatacacaccaaacatcagggcacccaaattcataaaacaaatattattagacctaaaaaaatacacagcaatacaataacagtgggggacctcaacaccccacagacaccactagatagactgagacagaaaatcaacaaagaaacactggacttaaattaaattttaggtcaaatggagctaacagacatttacagaacattctatccaacatcagaatatacactcttctgattagtgcatggagcattctccaagatagaacatatgttaggtcacaaaaaaagtctcaatacatttttaaaaaccaaaatcacaccaagtatcttctcacacctcagcagaataaaactagaaatcaattccaagaagaactctagaaactatacaaatacatgaaaattaaacatgatcctaaacaatctttgggttaatgacaagacaaattttaaaatttcttgaaatgaatgaaaacgaaaatacaatataccaaaacctctgggataaagcaaaagcagtgctaagagggaagtttatagtgttaaatgtctacactaaaaaaaaaaaaagataaaaaattaacaacctgtgtctcacctccaggaactagaaaaacaggaaaaatccaaacccaaagtcagcagaagaaagatataacaaagaccacagcagaactaaataaaatagagaaccatggaaccatacaaaggatcaatgaaacgaaaagctcgtttttatctctgaaaagataaaattgatagactgccagtaagactagccaagaaaagagaagatccaaataaacataatcagaaatgaatgagacattacaactaataccatagaaataaaaaacatgatcagacactcttatgaacaatacacttgaaaactagaaattctagagaaaatgaattcctggaaacatacaacctcccaagattgagcccatctggctcccaagattgagccaggaggaaacagaaatcctaaacagaccagtaatgagcagtgagattgaatcagcaatgcaaaacctcccaagaacaaaaaagcccaggaccagacaaaggtacactggaattccacaaaaggtacaaagaactggtaccaattctactaaaactctttcaaaaaatctaagaggagagaatcctccctaactcattctagaaagccactcttgctctgataccaaagtcagataaagacacaacaaaaaaagaaaactacagagcaatatccctgatgaatgtagatgcaaaaatcctccaaaaacaaacacaaatccccccacaaaaccccccaaaccaaatctaatagcacatcaaaaagataagccaccatgatcgagtgggttttattccaaggatgcgagaatggttcaacatacacaaaccaataaatgtgattcagcctataaacagaattaaaaacaaaaaccacatgatcatctcaacagatatataaaaaccatttgacaaaattcagcatcctctcatgataaaaacctttgacaaactaggcacagaagaaacatatttcaaaataataaaagccatatatgacaacccataggtaacatactgaatggggaaaagctgaaagcattccccctaagaactggaataaaacaaggattgcccactttcaccactcctatttcacgtaccactggaagtcctagccaaagtaatcaggcaagagaaagacagaaaaccaatctaaattggaaaagagtaagtcatttaatatctctgttttctgacaatctgatcttatacctacaaatccctaaagactcctccaaaagaatcctagatttgacaaatgacttcaataaagtttcaggattaaaaaaaatcaatatacaaaagtcagtagcatttctatacgacaataatgatcaggctaaaaaccaaatcaagaacacaatccaatttatagtatctacaaaaaaattaaaatacctaggaatgtatttaaccaaggaagggaaagatctaaccaaggaaaattatgaaacaataatgaaagaagttgtagatgacataaaaaaaatggaaaaacatcccatgttcatggatcggcagaatcaatattgttaaaaagaccatactgcccaaagcaatctacaaattcaatgcaatggctatctaaatactaatgtcattttttgcagaatgaggaaaaacaattctaaaattcatatggaaccaaaaaagagcctgaatagacaaagcaatcctaagcaaataacaaagctggaggcattacattacctgacttcaaattacactacatggctatagtaaccaaaacagcatcgtactgatataaaaatagatacacagatcaatggaatagaaaagagaacccagaaataagtcacatacctacagccaactgatctttgataaagtcgaaaaaaacatacactggggaaaggacatcctattgaataaatggtgctatttaatccatcttgagttcattacctgagatctccagagatccataacagattctaataatagccattctggctggtataagatgatatctcaccattgttttaatttgcatttctagaaatcactggtgatttcaaccacaggaggcaacctgaaaaagctccaagtggtcaaagtagaaataacttggtaacaaaataaacaatgcaatactggattataacacgaagtataaataaatacatatgagcccatactgattataaaatggatagtaagtgacaataaggagttactgttgtagatagacactgataaatctatgggtgatatgacattctccagcaaaaaataaaagggaaagataaaacaggaacagcagaaagttgataactgctaagacagtatggatatacagagtctatggcattatttacttttctatgttttttaagttttcaaaataaaaagtttaaagtcataggaaaacaaataggtcatccaaattatgtgtatgttgggggaagggtggagaagcagaaattatccatttaaactatcagtcaattttcattaacagaaaaagatgtaaaatgaatgttaaaactgaactgaatggtgggattacaaatggcatcctactaagtcatttttgtcacatatctccctcagtttggtggattagatgatatcttaacaaaggacataagcaattttagaattaatcaattttctatgttttatacatttttgaagtatatggacctaacaaatatatacacgtagactatgattatacagaacactccacccaataacagcagaatacacatttttctgaagtacatacagaacattttctaggatacaccatatgttaaactacaaaaaagccttaataaatataaaaatattaaaatcacacaaagtatctctgctgatcaaaatgaaatgaaactagcaatgaatagcagaataaaacctgaaaattccataaatatgtgaaaattcaacaatacacatacaaccaatagatcaaagaagaaatcacaggggaaactagaaaatatcttgggataaatgaaaacgaatccactgcaaaaacagtgctaagggggaaatctatagctataaatggttacaatgaaaaggaaaaaggtctcaaatcaacatcataaccttataccttaaggaaatgaaaaaagtaacaagccatcgccattaccaagaccaagatggctgcaagacttgctgccttcttcaggaatgcctgggccaagcagccagtgctggctgtgtccttcaccattgcaggccatgctataattctgcccccactcagcccctacaccaagtatgccatcatgatcaaccaggccacaccctacaattacccaatgcctgtctgagatgatgggagcatgccttatgtgtccagccacccccaggactcctagggcccaaccctggagtggctgaagaaactgtgagcatctccactgacagggaggaggaccctccccagtggctcccaataaaaatgtgaaaagcaaaaaacaaaaccaaattaaacccaatactgacagaagaaaggaatctaacctttttttttgagacagagtttcgcttttgttgtccaggctggagtgcaatggtgcgatttcggctcactgcaacctctgcctcctgggttcaagcgattctcctgcctcagcctcccgagtagctgggattacaggcatgtgccaccacgcccagctaattttgtatttttagtagagacagggtttctccatgttggtcaggctggtctcgaactcccgacctcaggtgatccgcccaccttgtcctcccaaagtgctgggattacaggcatgagccaccgcgcccagctggaagatggtattttaagaaagcctctcatgaaatgatttctgagcagaagcatgaatgaaataaggaagaggggctgggcgcagtggctcacatctataatcccagcattttggggaggctgaggtgggcagattgcttgagtccaggagttcaagagcagcctgggcaacatggggaaacctcgtctgtacaaaaaatataaaaattagctgggtgtggtggtgcacacctgtagttccagctactcagaaggctgaggtgggaggattgcttgagcacaggaggtggagactgcagtgagccgagactgtgtcattgtactccagcctgggcaacagagtgagaccctatctcaatcaatcaatcaatcagaaagacaaaggtttaagaaaaaacagcattccagccagagaatagaaagtaaaaggctgtgatgcagatgtcatatctgaggaacaagtgagggtggcagagacaaagggagggggaaaaacagaatggtaaagctaggtgaataggcaaacattatacagccttacaagctccttaaatacactggattttactcatgaaatgggaagccagtggaggatctgaagcagagagtgacatgatgtgacagatgttttcattctttttttttttttcctgagacagagtctcgctctatcacccaggttgcaatgcagtagcagatctcagctcactgcaacccacgcctcccaggttcaagcaatccccccatctcagcctcctgagtagctgggactacaggcacacctacatctagctaatttttttacattttgtagagacagggttttgctatgttaaagaccccaggctggtcttgaactcctgacctcaagtgatccacctgccaggcctcccaaagtgctgggattagaggcttgagccatcgcgcccaaccatgacagatgttttttaaaaaagtctctcaggtagctgagtggagaagaaattatcctgaataaaggaaaaataacagctgttaactacgattccggctgcacagtactcacctgaatgcttacctctttgggtttgaagctccttcatccaaagcttttcttccctctccaactgggatatcatatctggtttgaaggactgatgtcctataaaaagatagtatttaagtgaaaatgttaaaggcaaagagtactgaaaaaatctggttccaatcacatgatgtaagtctcctccctgccccagcatgcaatgtttagggaacatttttttttgtcatgacacattataagaaatacatttactatcactggaaatacattaccctgtgtaaactattgaaataaaaggttaaaggacctatttctaatcaatatctgttttcatcacatcccttacggcaagcagcagcagttattgccacaatgtgcaccattctggctaaggggctctgatattgttactctattttattacaaaaatgcttatgtaacttactaatttactgacccaccaatggatcatgacccacaagtttaaaaaagatatacgaaataaggaatcaggaggagccaagctcaactgttcttttatagttcatgtctaaaagaaaatcatctgtcttggaacaaaggtcagaaacatcttgtctctatgctctaaagagatagaaaaactctagtctctgagcagtcccaaagccttgaacaaggggacagaggccagggatgccactaaacatcccaaaatacacaggatagcctgatacaacacagaattatctggcccaaaacatcaatggcatggaggttgagaaaccctgctgaattacagagggtgcctgtccttacccactgaaaccaggttcctaaagttctccagcatcacatctcggtacagcttcctctgggcagagtccagcagccccagctcctcctcagtgaaggccacagccacatccttgaatgtcactgcctcctagaacatcaagcacatgtaacctcaatctcacacccaatggccactggcacctaagcaactctttctgtagagttactattcttccccttccacaatcacaccaaaaatgctagggggaagaaggaaaacaccttgtacatgtaacgtggtgccctttatatagttaaattcctagaactgtcattgttaaatcatggcatacacacattttaccatttgactgatagcaccaaatttgataagaaattttgcattaatttcttcccaacagtgtttgatagtactaccactattttgtcaatccaacaggccttcataaagctctggcacaagtacgcagttcactctctgggttctcaggaacatgctgtcttggtcaactgcagcagcatttagggtcaaggttaagagtacaggctctggagtttgactgccttagttcacattccaagggtctatccattgctagttttgtgacgctggtcacaaaacctcaatttccacatctgtataagaggacctatatcatagggtccttgaagggattaaatgagtgaatacatataagaacttaggacagtgtgtgacatacagtaagtactcaataaatgttgatcattaactcttattatcatcaccatcatctatttcatcccattcatagctgcatgatagtccataaacatgatctacaatatatttaaccattctaaataatgcacatttgatcattttaaatttaaaaatgacaatgccacaagaaaacatatttttacatagatcttagccagctcgtatggttatttccttaagataagttccagctgggggcaatggctcacttctgtaatcccagcactttgagaggtcgagacgggcagatcacttgaggtcaggagttcaagaccaacccgacaaacatggtgaaaccctgtctctactaaaaatacaaaaattagttgggcatgatggcacacatctgtaatcccagctactcggggggctgaggcaggagaatcacttgaacccggcaggcggaggttgcagtgagccaagatcatgtcactgcactccagcctgaatgacagagcgagactccgtctcaaaaaaaaaaaaaaaaaaaaggtaagttccaagaagtggtaattacattgtaaaaaaatatatatacctttgttttgctggtataatgttaattttctcaattaactcttcccgtaagagattataagtattcccgattctccatactctggccaaaactggacatttttttttttaaatcttgagtaatttggtgagtgatataaacagctatttaatttttttaaagatgatctgatattacttttcttcacatattgcctttccttaatcctactgggatttttcatgtatcagtaacattactattaagaatattaagtcattttctagaatatataaattcctaccccgcacctgtttcctacttgtctcataaagtttgtatatggtgtttttctgtatggaaattaacattttttatctgaagacactgcacatccctgcatttgttttggctggagttctgaacatctatgtaccaaacaactcgatgacacatgtggcaaagagccatgcactgagaaagggaatctggtgaagagcaatgtgatttctggagcccttcatccaccaggacatgccagggacacatacatgtgtagcatagcctcaagtccctgaatagtctcttttttttttttcttttttgagacagtctcactctgtcacccaggctggagtgtagtggtgtgatcttggctcactgcaacttctgcctcccaggttcaagcaattttcctgcctcatctacatgagtagctgggcttacaggtgtgcgccaccacgcccagctaatttttgtatttttagtagagacaggctttcaccatgttggccaggctgatctcgaactcctgacctcaagtgatccacctcagccccaaagtgctgggattacaggtgagccactgtgcctggccttcacccaaatggaacacctgaaacttctggcttaggcactggaagctttaacgtcagctgggcattgagtggacttcaataagtgtctaaaggttcacacctgtctctttatgtttaaaatacagataaggccatctacatcctcacaaagctgttccatggtgcaaattcctggtgaatctcctagtgctataagacttttaaactaagtatgtgcatctttaaaatataataacatgttaatgaataaaacagatacttaactataatacaaggttttacttagaattaaagaaagaaatctagctcgtttgaaactaaaattactttctctgagtttggcatcagtcagatgctactgcactaagctatactttattctctccataaaatgaggtgctgtgtatgagaaaatgagtctaaaactttaaagattaaaaaaatggtagaattctcagaatccttatttgggaagagaagttacatggggaaaaactgctattgtcaatgtccttaaaatggcaaaattcatagattacataaacatggagaatgaggaaaaataaaaacaagtaaatgatggaaaatgatgtgatcatttaaaaagcaggtgatataaaattaaatttaaaaaattcgaaattgtacctaaagtatgattatatatgttgagtgcaaatgaaaaggaatgtgggaaatgatttgtaaacatatttgtaatgtgagagttgttttccatttaaaaaatatatctgttaggccacggcaggaggatctcttaagcccagaagttcaagaccagcctgggaaacacaggaacaccccatctctactaaaaataattagctggttgtgctggtgtgtgcccgtggtcccacctgctcaagaggctaaggtgggaggatctcttgagcccaggcccaggctgcagtgagccactgcactccagcctgggaaacagggtgagactctgtctctaaatatatatagagatttatatttacatatatatatatatataaaactatatacttatatatgagtatatatatacttatatatatataactatatacttatatatgagtaaatatatacttatatatatttgtatgtgtttatatatacatatttgtatataaatatatacgtatatatttgtatgtatttatatatacatatttgtatatataaatatatacgtatatatgtatatatttatatataaatatatacatatatacgtatatatttatataaaatatacgtatatattgtatacatttatataaaatatacgtatatatttgtatatataatacatatatacaaatatacgtatatttcttataaatatatacatatatatttgtatataaatataaaatatatacgtatatataaatatataattatatagaaatatattttagaaattaacagatatatatatatctctctgttaatttttatactattatattgaaataaaaggcaacaacctggcatataacaacattccaagtgcctttcgttcccttttactgttcccaaacaggaaaaatgtgtccaatctttgtgaaatgagatgtcattttaagaaacacaaaggcaaaccaaacttacctggaacttggtcatttttcccctcctccttctgggaaaaggcagagttccggggaagtgaacctgagggagggaaaggcatcatgagataggttagggatggcattagtcaccatggcacttttatgtgacacttcagagaaaggtccccctgtctctaggcagacacagttgcacacggcttagtgaggagaacgggagctagctcccagctacccctcggccccctcaaccagctgcttttgttcatgaacatttcatattaacagacctaaatcaaatacagctctctgtgtactccttctgaactttagtttccaaggaaatgagacacagacaggcaggggaatgtaacagagccaaaatgcctggcttcaaattttggcatttctacctattttcaactgatcagcagtataaaccttaagcgaattattaatctctctgtgccttaattcagttacctgtgaatggggacaataataatgcctgtattctctatttcctgcagcttctgacaagcaagtgctattatgcttcataaaactgcccttttgagtatgctttctagaaaatgaatcttttaagaaacccagaactcaaaaataattgctctgtcctgtgagttaccattaccctcagaaaagtctgtaactgtgattggttgtctaacataattagttccgttggtaatgatagttaaactgccacaggtttttttttcctccaacagatgtaattacttgcaaatgttactaagctggaggagcctcaagaaagtctctttttccacatgcatgaaagcaatgactaataaaaacctaaaactctctaagaaatggtgttacacttaagttaaccacacgggattattggttataaccacattatactgaacatttattagggcctcaggacacctctggcactctgcaaatccgtaatgacgatcgcttatctgagataaaacacacaggacattccccaggctccgctggaactaattcctgtctcctaaacaagaggctagaaaagtccaagaatccaggaacggccccacatcaggcaaggattagagaagggacagcggctccgtagctggatctcctagactcagaggagtttccaaacaacaggcgtctttttcagtattataacagaattaacggtggcatccaacattttcctatgcactggttttaagcttatttctataaaacctcatttaattctcacaagaacatcactgggaacgcactaaccctttacaggcacgaggaaactgagacaaggagagattaagtaacttgcccaatattttactgcgaggagcaggcaggactggctggtaggtgcgtgaggacggctagggcagcagaccctcaacctcgaaggacgacgcgagcccgcctcccacgcaagaggttctgccgaggggacgcaaactcccgcagcctcccaaccccgccctccagcgctggccgcggcttctcttccccaagccaaggacgggttcattgctggccccacgcctaggcaaagagggctcggagaagtcttggagacccggagctgactcacctccctgggagatatctcagatccgacctcgccttcctggagcggaagtgcctccgagtgcccacggttcgtggactccacttcccagaattcctaagcggaagcgtctcagagttctctcactcctggactacagttcccagaatgctccaagggcagcgcttcccaccagctgggctttgttttgactcaagccggttgggtttgagccacttctctggtgctactactgtgagattcgtttttgttttattcatttttaaaagctcatgagaaaataattgtaaaatttttaaagtgatgacatataaaaatgaaaagtgcagcttgtattattaaaataagttagaaaccaaaatttttcgcagaagcagagggtaggctaaaatgggaagcgtaaaagtgacttaggctgagctccgatggacgctgaacgttaaggaacaccagatctcaaacttgtgtcaaatgccggctccccaaatatcatcaactcaacctgttgataagacaaaaaacagaatttattgttgattgcagtaatggagaacaacacttcgacggagcgttggcaccttcacagagcaaagtgtcaaggcaaggttggaactgattgagaactggatgtttaaggcgggtctttcaatgcaagggattttattagtattgcataatgatcatgatactacagtccaggattggtggatatagcaaggatttttgaagcaaagaatcttaaattgcaatctattgacactttctttggaagagattgaaaatttgatgggtctctgtggaagttcccataatgaacaattaaacagtttgcttgggcaggaatctcctggaataaaggcctgctgatgaagacagctgaacaatcatgttagtgccgaaagtaaattgtgatgaaacgggaaaagttcacttctccctctcccagggcatgtgatggggtgtggctcgcttcttcgtgcccagccgctcaaacctctaggggagcatgcacacgggcaggttgtagggctccaaccccacggcagtgtctaggggtgaatgtttacagctcctgaagccccagtgggcgtgtgttatagggtgcttttttagttcagccatctgtaggaggcttgtgttagctcaattagacccctgacttatcgcaagcaagagagggctttctgtatcccagaggttcttgccttggtgtaccagaagaatcgcatcacacataggcttggagaaagagtgcaaggattggagaaaccttggagaacgatttgtaagtagctctcagcagaagggggagccagaagggagatggttttcgcctggagtcagcctctcagcggcctgggcgctcctccgactacccaggccaaactgcgttattccaccggttaatggcctgctggcctgccggtctcttcagtgtgctcttttgccgacccgctcccctcgacagcctctcgacagccagctgtttgtgtgtccgccaatgctctcctctcaacgtccagcagcttgtgtctctgcctgctagggtatcagggtttttataggcacaggatgggggcgtggtgggccagggtggtcttgggaaatgcaatatttgggcacaaaggcaggaatgcctgtcctcacctaggtccgtggccacaggcctgggggtagagccctagtcagggaccacacccttctcccctccagcacttccattcccctcttccgtatcagtgaggggcagggaaagaggatggagttttagtccttagtgtccaagttgtgtatatttaggggtcggtgacaaggagagaagggagtaaagtgtttgactcttttccctccattattcctcaaggtacctaagggctcatgacagtgttttgtttaatgtgctattcgttctaatatactaagaacccacaaaaaggcaatataaatattaagccagagaaatatcttgaacttcatttattttaaatgtgtactgttatggcaaacaaaagcagctccattggccgggaatctaagacaacgttgtaatatgggcatgtgtaaaatcttgaattgttttctaatttgtgttcggcttcaaatatttcattacatactttgatcctgatcctgacataaatgaaattaagtgtcttatggttgaataaactagatgaaacaaagaagccgtgatttttctcctaggcaggtataaatatacaggtgaccattgaaaaacacaagggttaggggagctgacccctgggcagttgaaaaatctacctgtaagttttgactcccccaaaacttaacttacttaactaccaataacctgttgaccagaagccttaccaataacataaacaattaacatatatatgtgtatatatatatatgttttttgttttgttttttgagacagagtcttgctcttgttgcacaggctggagtgtaatggcacctcccgggttcaagcaattctcctgcctcagcctcccgagtagctgggattacaggcataaactatcatgctcagctaattttgtattttttttttttttttagagacggggtttctccatgttggtcaggctggtctcgaactcccgacctcaggtgatctgcccgccttggttggactgtattcttacaataaagctagagaaaataaaatgttattaagaaaatcataaggaagagaaagtattttttgctatttattaagcagatcatcacaaagatcttcgtcctcatcatcttcactgagttgaataggctgaggagaacaaggaagagaaggggttggtcttgctgtgtcagggatggcaaaagcagaatacaatgtatgtataagtggaactgcagagttcaaacctgttttgttcaaaggtcagctgtagtttgttacattttattatcaaagttttcaaacatatatagaagtagagagaatagtaaaatgaactctatatactgatatcccaaattcaataattaacactgtttagcctatttaattcatctatcactgtttttttagttacaattctaaagcaaattcctgtaattatgtcttttcacctcaaaatgctttgctaaatatattttaaaataaaaatattttctttcaaaaccacaatactattatcacactgaacaaaataccagttatttcttagtatttcctaatacttgacaaccaaaatgagtgactcaggcataagtctcagtcattgaggtttactaagccagctgtaggacctgccggggaaaaacaaagccacagacacatctgtgactatctttccaaagaggttttcgggaggtttagtatttgtcaatttccttaaaggggtggggaagggatataggaagaggggtaggtatgcagttaggcgaatagttacattcttgtgagactttagttagtccccaataaatctacatttttacataaataaggtgaatgtcttaaaaggaaaagggagtaaaagaagagtcaattatgtagatgtatgtggaggtagaggagagtaggtggaggaatgagtcttgactttgttctgcacctgggaagataaacttgtaatcaacattattgtaatcaccgagggttcttcttactgcctagaaaagccagtgcgctgaggacagcaggttttgaagcaaataaatagtttaataattgcagggccagccaaatagaagaatgggagatatctcaaatctgtttccctgagaattcaaaggctgggatttttcaaggatagtttggtgggcaggggctagggaatgaggaatactgattgatttagttgggaatgaaatcataaggggtcgaagctgtcttcgtgcactgagttagttccagggtggaggtcagtttcttggtatgggatactggtctgggtgacatcatctggtccatcagaatgcagggtttgaaaaatacctcaggcaccagttctaggttttacagtagtgacgttatctataggagcaattaaggaggttacaaatcttgtgacttacagctttgtgactccttgtggacaatttgttagctttacgaaggcagtttcagtccctaagcaaggaaggggttagttcc[138 bp omitted]gcctca[224 bp omitted]atagttagcttggcctatgcacaggaatgagcaagtacagcttgtggggtgagaaccaagatggagtcacttatgtcagatttctccactgtcatcatttttgcaaaggctctttcatgatcagtgtggagttttaggagctagacttagattgtagaactaaagcaacaattggcatgtgcctgtttatgagaggtcagcaaaaattttacttatgagtaatctatggggaaagctcttcccaaatacctgaggcttttcacctttcatggggatctggctaatgcacagctgttcgtttggaagagggtattgcaatgactgaactccagggcttaatctccacacttgcctaagtttggaggatcctgagatgtttattttcctttacatacccaatctctattaaaattttcctgattacctaaaaatatctcatgactggtttgtcaaatcaatatctagcccattcattttatttatctacttaggtgtatttattattgaacactactacatcactcctttgtttcagaccctgacctgttgaaggaattaggtcagttgttatgatattacacattccggatttctccaacttttctggcctctgtccctagttcctgggaggtggcatctaaactcttaaaatatcctgaattatagaagctctttgttattcacggtgggccactcacactatacctgacagattgtgctaaagaggtgacacatgatgggcctctggataagttatgctagtgagattacttcagataggtgctagttacaccagacagatcgatcatgtgatttgaagtttgggactatgagccaaataacaccagcctgtgtagaggatgggggctagacactgagttacatgtcagttcaatcagtcatacctacgtaataaagccccaataaaatctatgaacacaagcttggatagacttctatggttggcaagtattctcatacagctatgtgctgggagggtaatgtgtcctgaccccaagagaaagaaccatggaatttttcatctggaaccctcccagaccttgtcctatgcgtttctacctttggttggttttgatttgtatcctttttttttttaataataaagctgtagttaataaatataattttcctgggttctgtgagttgtttcagtaaattgttaaacctgagaggttagtgatcagaagtggtcagctggtcagaagtgagggtggcatggaaacccttgaacttgcagtttggaatgaaaaaagtcttctgagcactgtgcacttgaactgtgaagtttgacctaacactgagtaattagtttcagaagtaattacaccacttaataatatgggctaatacctttacgaacctcagggcagaaagtattttgtttagagacagggtctcattctgttgcctaccttggagcgcactggtgaaatcatcatagctcactgtaattttaaactcctgggctcaagtaatcctcctgcttcagcctcttgagtagctaggactacaggcatgtaccaccatgcctggatcattttttaacttttttttttggtagaaatgaggtcttcctatgtggcctaggctggtctctaactctcagcctcaagcaatcttaatcctcccacctcagccttccaaagtgcagaggattacaggcatgaccaccttacttgatcaaagttttcttaatatgtgcatacctgggagatattgcaggtttgggtccagaccactgcaataaaatgagtatctcaataaagtgagtcacatgaattttttggtttcttattgcacataaaagttatgtttatactatactgtaaacataccatttacctgtgtaatagcattatgtctagtggctcatgcctgtaatcccagcactttgggaggcc[135 bp omitted]gaggcaggagaatggcgtgaacccgg[138 bp omitted]acaatcatttgagccttctgtgagttgtgtaatcttttatctggaggaaggtcttcccttgatgtttatggctgctgactgatcagggtggtagttgctgaaggctggggtggctgtggaaatttcttaaaataagacaacaatgaagtttgcccccgtgatggactcttcctttcatgaaagatttctctgtagcatgtgacggtgtttgatagcattttacccaaagtagaacatctctcaaaattggagtcagtcttctcaaaccctgccactgctttatcacctaggtttacatcatattcgaaatcctttgttgtcattttaacagtggtcacagcatcttcactaaaagtagattccatttcatgaaaccactttctttgttcatccttaagaaacaactccttatcctttcaagttttatcatgaaattgtagccattttgtcacatcttcaggctccacttcaaattatacttttcttgatatttctaatacatttgcaccacctgagtgctactgtccatttcagagtctacttcccagggaatgcaacccgcaacaatgcttctctttgggcagcaggctcctttctctaaaggctgctaatctttggtgcatcacccagtcagtgcatatttctcttggtaccacgcttagctaagctatacttcttccacgtattctggattgagaaattgcattttccacttctatgatatcactgggtatttgttaactcaatttcccctattagtagtaatgatattattagtattaatatttttaaattataaaatcataatctactattttcttttaaataatactaaagataacagctaaaatctccttcgaccaccacagctgcccagtactcttctccattccctgtctttaaggtagagaccattatcagtttagtatctattcttatggactcttttttgtttgtttgttttattgtatttttatttattctggactctttattctgtattttatttatttattctggactcttttatatgtatttaaatgtgtagaatgtgtgtccttgtaagacttaaagaacatcattcatcttacatgctatataatattttgcaaatgtgcttatacagtttatatgaaagacacagaaattgttttcaatttttccactattacaacaaagctgcaataaacgtctcattcatgccctcctatgaggtgtgaccattctccatgggagaggcagaaaaattgcaattgctaggtcatgtggtaagcatatttaaacatttgatagctactgctaattaattcctcaaagcaattgcactagtttccactcccacaagcagtttatgagagtagcaaattcacc[131 bp omitted]tgaaaccccatctgtactaaaaataaaaaagttagccaggtgtggtggtgcatgacggtaatcccagctacttgggaagctgagacatgagaatcacttgtacctgggaggtggagattgcaatgagccgagaccatgccactgcactccagcctgggcaagagagtgagattgtctcaaaaaaaaaaaaaaaagaaagaaaaaaaagaaaaaactttgacaaccttaagggataaaaatagatctggctgtagttttgacttccctagttactaacatggttgggtacctttacatattttcactatcaatttgaacttttatttaagtgacttgcctgttcattatgatattttttctattatatatattttttattttttgcaatatgtattgttggggttgcctctctctgatttctaatcctttggttttgttcacacagtgaaacattatttatgtcacatatcgctgatagggatattcagctgtgtgggcacttttgttgtctccaaggaggtaaaaccttaccatagtcctaactgcagtatcacataaagggtctgaacacacacgtgtatggattctaatgttaagactcttgctattcttcaaacccttagatccctgtgttgggttggctgttattattgacttggcatcacaacaaccccctctaacaacttgtctgtattgaagaagaaaagcaagcatctacccatttcccaggatctccctcccaatatggttttacattacagacaacaatggaggagactgttatataatatttagcatgtggaagacaatgagaagaaaagatccaacttaaaatgggcaaagaatttcaacaggtagtcctccaaagaagtgtccggtacacacaaatggctaatgtagggtcctccagttaccctctctttctgtgtcctgaccaaaaatcacagagtgccttgaccactctgtgacccagccagctgcacattttttttccagcaggcttgaacccaaaccggggccttaaacattcccagacattgataaaggcatctaggttgttgcccaaaatactgaaagaaactggccctggccctggaccaaattccttaagcccccataaaaactccataccctgattccctcgctgtgaacatacctaggtagaatgacccttttctttcactgtccatcacaagaattgcttgcagccctctttaagttccactactaaatgttttggactgatcacactggcatttagtgtttctttctttagaatcccaaccagccccatctcaggatggtttgggggtactccatggtgggaactcccctgccactgcttttggggcaattccagccatgggtttggtgggatgaaccagctaaatagcacatgaaaacacgctcaatataatttcattagggaaatgcaaataaaaattgcaacgtgataccacttcacacccactagaactcctgtaatgaaaaagacaagtaataacgagggttagcaaggatacagagaaacgaactgccatacattgttggctggaatgtaaaatggcgcaactcttttggaaaacaactttctcatatacaattttccatcagtctttccttttctctctttttgccctccacagacttccacctcacatctctaaactctaccctctgtaattcccacctctcttttcaggattttaggatcaaatcaaccatgcttttcttacacccctaaaagaaattacattacctagacccaaatcagtctgaaatagaaggcactcgaattgttgtttggagagatctcagagtggattcctatagccatactcttgcttttactctcaataatcattattagtttttggcagtacttatggtaagacaagtaacttttaattctgttgaaaccttaactctgggcctctatagggcatcattgtctttgcaaacatttactgtacacctgtaatgtataaagcaccatatttactcttaaggagttcccactctactgagctaaaaatgctataggactgtgaggggaactaaaaaagcaaaacaaaccaaatccaaaattagtaaaaagaaagaaataataaagatcagagcagaaataaatgaaattgaaactataaaaacaatacagaggataaaatggaaagattttttttgaaatggcaatgttcataagcctttagctagactaagaactgtgagaaataaggacaaaatattagccatatctaaactgctattaatcccatctgttaattttttttttgagatggagtctcactctgtcaccaggctggagtgcagtggcgtgatctcagttcactgcaacctccgcctcccaggttcaagcgattctcctgcctcagcctccctagtagctgggactacaggcacaagccaccacactcagctgattttttaatatttttagtagagatggggtttcaccatattggccaggctggtctcaaactcctgacctcgtgatctgcctgccttggcctcccaaagtgctgggattacaggtgtgagccaccgtgcctggctcccatctgttaaattcttaatgtcagtcattgtgttgagctttctaggattttaaatttttatataaccattttttaaaaatggatcttttaaatgccacactaagcataaacttttcaaaaacagaaccaagtgattacttttagttttcatttattttctttaatcagttgttttaaagtttgtgcccgctaactccaatatctggatcatctggaagtccgtttcaactattagaatatcatgcttatgtacagtttcttttgcctgcagtcttaaggaatctactcattccccaagtttgaatgtttatattgtcttttgtttttgttttggcatttggccaattttctggcaagccccattaatttttgttgaatgccaggtattttgtataaaaaatggtgttgactctagataatgtaatcttccttcagaggatctaagttttcttctggcagacagaggacaggcatatcacaaactttactcacatgatgttgtgatccattatttttgacttggagaatatgaggattttcattttcggcaggacaatgagccaatatagataaaatttaaaacacgtctattcactcaacaaccacacatttaaatgttctatggagatgatgaatataaagagatgaaacttatttttctctggtttttattgcattgtggtttagaagagtgaaaaacagtaaacaggccttcaatagtaagaaattggttaagtaaaaataacacattaatacacaagaataccatgcaggcattaaaaattaggttgtaggtcatttaaatttttttctcagtttattgttttgtttcttatttttatgataatttaatacatttatgtaatttgtaaaaatcaaatcagtgtacttggaatatccatcacctgaaatatgtgtcctttctttatgctagcaccattctaatgcttctcttctagccattttgaaatatacaatagattactgtaaactatagtcaccctactaatctactgctaggtcttatttcttctatcaaaccatatttttgtacccattaatcaacttctcttcatccctcctccctactacccttgccagcctctggcaaccagcaatctactctctatcttcatgagatccactttttttagcttccatatataattgagaatatgttatttgtccttctgtgtttggcctatttcatttaatataattactcccggttccatccatgttgctgcgaaagatggtatttcattcttttttatggctgaagaatattccattgtgcatatatacaattcatccattaatgggcagttaggttgatttcatattttgcctattgtccatagtgctgcaataaacatgagattgcaggtgtctttttgatatattttctttctttgaatatatacccagtactggaattgctggactgtatggtagttctatttttagtttttaaagaaacctccatactattctccatagtgattgtaccaacttacatccccaccaacagtgtacaagcattccccttttgccacaccctcaccatcatccattattgcctgtatttttgataaaagtaattttaactggagtgagatgagatctcactgtggttttgatttggatttctctgatattgatcatttttttccttatacctgttggtcacttgtatgtcttcttttgaaaacatctattcagatctgttgcccattaaaaatctgattatttggcttttttgctattgagttgtttgagctccttatatattctgggtcttaatccctggtcagatggtcagtttgcaaatattttctcccattctgtgggttgtctcttcactttttaaattgtttcccttgctctgcagaagattcttagcttgatgtaatccaatttgttaattttcactttggctgcctgtgcttttgaggtgctactgaaatctttgcccatatcaatgttgtgaatcatttccccaatgttttcttctattaatagtagttttatagttttaggtcttatatttaagtctttaatcaattttgatctgatttttgtgaaggtgagataagggtctagcttcattcttttgcatatattcagttttccctgcactattaattgaagagactgacctttcttccattgtatgttcttggtgcctttgtcaaagatgagttaactataaatgcatggatttatacttgagctctctattcttttccattggtctatgtgtctgtttttatgccagtactatgctgtttcagttgctgttgttttgtagtatattttgaagtcagatagtgtgctgcctccagctttcttacttttgctcagagttgcctttggctatatggcatcttctgtggttccatataaatgttagaattgtttttgtctatttcagtgaagaatgtcattagtattttctttttttaaattaaattaaattaaattaaattaaatttatcactattatttttcttgagaaggagtcttgctctgtcgcccaggctacagtgcagtggcgcaatcttggctcactgcaagctctgcctcccaggttcacgctattctcctgcctcagcctcccaagtagctgggactacaggtgcccgccaccatgcccggctaattttttgcattttttagtagagacagggtttcaccatgttagccaggatggtctcaatctcctgacctcgtgattggtctgccttggcctcccaaagtgctgggattacaggcatgagccactgtgcctggcctgtcattagtattttcataggaatttcattgaatctgtaaattgcattgagtaatattgtcattttgacaatattaattattccaatccatgagcatgggctatctattttttgtgtccttttcaatttctttcatcagtgttttagagttttccttggatagttctttcactactttggttaaactcactcttaggtattgtatattctttgtagctattgtaaatgggattgctttcttgatttcagattgttcactgttggcatatataaataatactgattttttatgtttattttgtatcctgcaacattactcaattttcttatcagttctaatggtttttgatagtctttagtattttccatttttaataacatgtcatctgtcaacaagactaatttgacttcttcctttccaatttggatgccctttaatttctctgggaactggagtgctaaagttttctcagtgttcctcccacctaattgttctatgcaggatttccagtactatctatattgaataaaggtggtgagattaggcatccttgtctttttcaagatcttagaggaaaggccttcaattcttccctgtcagcacaatgttagctgtgggcttgtcatatataacttttattattctgaggtatgttccttctacacccagtttgatgaggatttttatcataaagggatgttaaattatattgaatgtttatttttagcatctatcaaaataatcagatggtttttcttcttggttctgttagtgtgacgtatcacacttatcaatttgcatatactggatcatccttgcatccttgggatgaatcccatttgatcatggtgaatgatctttttaatatgttggtgaatgatctttttaatatgttgctgaattcagtttgctagtattttgttgaaaatttttgcatctatgttcaccagtgataatgtcctgcagtttttttttccattgtgtccttttctggttttggtatcaggatactgttggccccatagaataaatttggaattattcccttctcttcaatttttgtgaagagtttgagtagaattggtattagttctctaaatgtttggtagaatttagcagtgaaaccattaggtcatgagtttttccttgataggcgactttttattatggcttcaatttcattatttgttactggtttatcgaggttttctatttcttcatagttcaactgtggtcgattgcatgtgtccaggaatttattcattacttctaggttttccaaagtgtatcattgttcatcacagtctctaatgattcttatttctaatgattcttatttttgtggtctcagttgttaagtctcctttttcatttctgatgttatttacttggatcttctttctttcttggttagtttagccaaaggtttgatgatttctgtttatctttttaaaatcccaacttttctttcatttatcttctgtattcttctttcattatcaattttatttatttctgctctgatctttatttattttcttctactaattttggatttggtttgttcttacttttttagttccttgaggtgcatcattaggttgttatttgaaatctttttacctttttgatatatgtttgttgctataaacctctaagttttgctttggctgtatcccatagattttgccatgttgtatttctattttctttgtttcaaaaaatgtttaaatttccttcttaatttcttcattgcctcactggtcattcaggagcatgctgtttaatttccatgttgtttgtgaagcttccaatgtcctttttgttattgatttctagtttaattatactgtggtcagaaaagatactgaatataatctctcttttttttttaatttgttgagatttgttttgtggcctaagatatagtctattctggacaatgttccatgtactgatgaaaagaacatctattctgcagcaattgggtgaaatgatctgtaaatgtcagttatgtctattaggtctagtgtgtgacctaacttcaatgtttctttgttgattttctgtctggatgatctgtccattgctgagagtgggatgtcaaagtctcctactattattattttgccatatatctcttattttcgatctattaatgtttgctttataaacttcggagttctggtgttgaatgcatagatatttataatggttatatcatcttgctgaattgacccattaatcattttatagtgaccttatttgtcttttttacagtctttgatttgtagtctatattgtatcttatacaagtatagctactcctgctcttttttcgttgcctgttgcaagctatgtctttttccaccccttcacttttagactatgtgtgtctttacaggtgaagtgggtttcttgcaggcagcatatagttgggtcttgtttctctatccattcagccactttatgtcttttaatcagaggatgagtcaatttacattcagtgttattattgattagtaaggacttactactgccatttgttgcttgttttctggttgttttgtaactcctccctttctttcttcctttcttactgtcttctttttttgcttaaatatttaagagtcttcatttttctgtcttcctttgtggttaacagtatgttttaatttgttgctttttacttttagtgaatctattataggtttttgtattgtgtttaccataaagcttacaaaatacattttatagatataacaggttattttaaagagatgacaacttatcttagattacaagtaatagaaacaaagaaaaatgaaaagaagaaacacttctacacttaactcccatccgtcccaccttttgatttttggttgtctcaatgtacatatttttatattacctatttcttaacaaattgctcttgctattattctttttgatagatttcttttgggctacatactagttatgagtggattgcacatcacaattacaatactattcttggtttgtctgtgtacttaactttaccactgggttttacagtttcagaagctttcattttgcacattagtagctttttctttcacattggaaactcccttgaacctttcttagaagtctgttgtggtaaattctctcatcttttgtttatcttggaaagactttatctctccttcatatttgaaggataactttgctagatacagtattcttggatgatagtttttttttttttttaatttcagcactttgaaaatgtctctgcacttcctcctggcctatatggcttctgttaagaagtcttttgccagatgaattggagctcctttatatgtcatttgcttgtttttttttttttttttttttttttttgctgcttttataattctttctccttgacctatgagagtttattatatgctttggggtagtcttagttgggtcaaatctgtttgctgttctatgatttccctgtacctggatattcatctctttcttaaattttggaaagttttctgttattttgttgaatatactttctactccttgctcttgctcaactccctcctgaacagcagtaattcttagttttggtcatttgagatattttctatctctttcagtcaatatttgctctttttctttctctgttctcttctgactgtgtattcacaaatagcctgtcttggagctcactgattctttcttctgcttgatacattctgctgttgagagcctctaatggatatttcagtgcagcaaacatatttctcagttccaagatttctgtttgattttaaaaaattattttattctctgttcaggttctctgatacatttctgaattgcttttctgtgttatcttggagatcactgagtttccttaaaacagctcttatgaagtcttggtcagagagttcacatatcgtcttcctgttaggatcagtcactggttccttgctttgtccatttgtgggatgccatggctccccgtttgctgttgttgcttatggatgtgtgtctgtctttgcatcgaatgattatacattccactattctctgtctggctggttttgtttttcattggatatggctccctagagattctttatattttacctgttgattttcttctttcccgttaggttactgactcctttttggtactagatagcctattaactccaggtttgcctcagttctagtaaataatcatagtgccacccatcccaaaaggggtaggtcccataggggatatcctagttgtaagaaagctggctagtggttcatgattggggacctacagtatagtgatgctgaacagccactctgattgttgtctcctttggctgagttgcagagtagagtttccatgacggggacagtattcccacctccctcctttgtctctggctgtcctcagggatatttctctcttcagttactcctgatgctttctgtgggttgagtcagggacaagtctcctgccaggaaacccaagatggggaggaggctggttgtccaccttgattaactttttccagtatagaaaccgtgagacgggaaaattttccacagtcttggcaccaggcagattagggggaagggcactgtggataggaaagtccacttctcttatcatctgctcagttttttccacttatttgtgtcctcaggaactgtctccttctatttgagttctgggatattgctggtgataatcttggtgctgtatatttgtctttagttttctattgaaaggagtgaagccagcttgcttctacattgctatttttggaaccagaatttaatttctactactgacttatgagatgtactttaaaaaattcttaaatggttactctagggcttaaaatatattcctgtattttttcacagtctatcttcaaatcatattatgccaattcatgtatagagtacaaccatatacctctaatttctgctagtatatttctaatttctgtcttccctgttttgcagtgttcttacgaaacatcttatttttgtatgtcctctaaattcataaaacctcattcctaattttgctttactgaattatattttggagtaataaaaataaaaattattttacacttaaaatgattgaaataactattttcatagttatgtcttttggtagatccaagtctatttctggtatgctaaatatctcttacagtgcaggtctgctaacagtgaattctatcagcttctgttcatctgaaaatgcctttattttgcataccttctgaaagattttttccaccaggcttagatttttgattgatcattttttttattgttgtttctaaatgttaaagatgtaactccattgtcttttgcttgcatggtttgtgatgataagtctgatgtttttctcactctgcttcttatatgtaatgtgtccctttcctctgtctgccattaatattttctttgcactgtccatccatttttagctattgggcaataatacctctagttttgttctttttttaaaaaaatactgctttggtattctgacgttcttgaatctgggtgaagtcttattatttttggaaaattctcagccattatctctttaaatatcttttcttcccattctctcccccgaccctgggtttccaagtatgcaaatattagatcctacaatgttgtcctatttgtattgttttcttcacactttttctttttgtgttttagtttgcatgatttctattgacctatattcaagttctgacacttttctcaactatgttgagcctactcataagtccttcaaaagcattctgataaaagtaaaagcagtagcataaattttcttttcctagcatttcccatttgactattaaattttactgaaatccctatctgctcatgcatattatctgcccttttcactggagtcttcagcacatcaatcagttatgtaaaattccctaatagttccaaaatatggttatctataagtgtggttttattgattggtctgctatctattggcagaagattgttctcaacttttgatcttgtgtttttaaaataaaatgccagataacatatacaaaacagtagagactgaagacaacattattttttgcctaaaactgggcacacatgttctgctaggatgtcagggtggagtgctgaattaatctggtcaggaatcaagctggaattgggttttgttgttgcaatatttatcttagttgtaccatggcttcaaatttctctagtgttaccttgtgcttagggtgggaactggagtgctaaagttttctcaatgttcctgttgccccatcctcagcttttggccatcccttggcaccagggccaagaaagattctccatgttcttcccttttctcacggtagcctgctgttgcttctcactaggaataggctaggggaccagcggtgtcctttgttgtcttggttagtctcagttgttagtgggaattggagtgtcagagattctatgcattttggggagccagaaccacacaggactaaaatggtacagaatatctcttccttcggctgtgaaaagaaagcaggtgatgctgctatattgtgaacaacatgaagacaagaattcacaagaaaagagaggtgagagaattaaaagaaagcaatataaaatccccctaccttacccagaccctagtcttacactatctgtatcttttcatttatatgaactaagaaacagttttggtttaggcaactctaaattttctgttacttagaactaaaagcattccaattgataaaaccaccatgagctctcccctgtaagtgatgatatcaaagacatgctttagaagccctggatttctgatgatactgtgcaacttgaaccagcacctcaaaagccaagttatgccagtgctttggtcatcatattcatccagcaaggggaaatctgatggaaaagccgtgagcatcaatttataaaactggattgcactaggacatcctaggcaacatggattttgagacctaaggaaatttcacagaaatataaagttatggacacctaatttatctgtattcttaaaaatccaggaaattttaagaactaacttcagggggtttattctttactgttgttggtcataatgtcatacagtgaaatcaagcaatcatatcatgagttcttaagtataagagataatatatcaatagctgtttactgctttggtgtaattggtaaatgtccattataaatatttttaaataaagcacagaaaaactaagccaaaaatttctttccagagaaaactactgtggatataataatgagtaatctttcacacattatctataagcatatatttgaacatacatgcacacaggcttaaattagctggctattatgaacgtacagtccaggtttttactaaacaatatgcatgatccattcttgtcattttagagctaaatcatactttctgtagatccatagtatagaacatacagaaacttacccaaattcatattgatggacatttacttccagcttaaaacattactatcattgtaaaatcctttcttactgctaaaattgcttaattataaattactgttctacgatttccagatcggtatgcacattttacattccgatatatatggggggcttgataagtattttgatatatatagaacgacaagcttgtatttttcactttcgccaacaaaatgcatcattcttgaagacagacactagcaagtaaatggcaaccctatcctgctagtcaatacattgataaatatgcttagaaaaattcaagattttccctttttttgtgtgtgagtgggagaagtatgggaatggaaaacttgacaaaattaaaatctttcaaacttgaccctgcttaaggaggtgtggattggacaaaggctacaacatttagaaatcagtcagatcaaatggacttttagagaaatatggagaataaaaaaaccccaagtattgtgattttgacatttattaaaaagtatttgtcatcagtaaccattttggatacttgcaaatattacagtaaaactctgccttaattcacagggcaggagtagaaaatcaattatgtaaaatacagtgttccatttttgcaacattaaccagaaacattgtttatcagtttgtactgatatttcaagtgcacacatgggtacatatacacacacacaaagctaaacttcagcagatggtataatgtatagagaccaaacgttaagaaatgcagcacatctctgctcaagatggaacaaagggtgggaactaaccccaatagggttacaatcaaattaatgttatttcagatcatcataatgcttattgttctacatttcaaatatttacttgaaatgattttattaagattacttgcaggatttctcctccaaatacattttaagttttaaaaaatgcgcttaaaaatttcaaaccttttacctttacatacttttagttatttagcaaaaagtactgagcacctacattgcgttatgaaatgtcctagttttgtagactagcaatgaacaaagtcccttctttcaccaagcttacattctagagaacatggatttaggcatgctcatcactgtacttttattaaattcctgaccatactcatattttataagccttagctcctgtgcaatgactgatgttaaagttctaacaaaatccctcgtgaaacccctctcattaaatgtctctgttgtgtggtctcctggccattatgaatgttgaagttgggcagcaacattacattttaatttttaaaaattctttttctactgaaagaactctagtgactggaaaatttcagctcccatttgaggacttcaaaacaaaacagaatcttcatttctgtgtagattctctgatgaagggtagtccttaccatagtcttcgcttttatagaatttatcactactatggactctttgatgaatgagaagacctgagctccaacggaaacccttaccacatgcatcacatttgtatggtttctctcctgtgtggactctctggtgagcctgaagatttgatctctgactgaagccctttccacatacctcacatttgtatggtttctctcctgtgtggactctgtgatgggcttgaagacttgaatacccactgaaacccttaccacactgttcacatttatagggtctcccttccacatgaaccctttggtgtgcttgaaggcgtgaactctcactgaaaccctttgtacacacctcacatttgtatggtttccctcctgtgtgaaccctccgatgtgcttcaaggcgcgaactctgactaaagcccttcccacacatctcacatttatacggtttcactctagtgtggactctctgatgaccttgaagatatgctctctgactgaagccctttccacatacctcacatatatatggtctttctccagaatggacactctgatgactctgaaggtatgatctctgactgaaactcttaccacactcatcacattggtatggcttctctcccgtgtggaccctctgatgggccaaaagtgttgaggccttactgaagcctttaccacattcttcacatttatagggtttttctcctgtgtgaaccctctgatgaatttgaagattaaagctccaactgaaccccttcccacattcctcacatttgaatggtttttctccagtgtggactctctgatggccttgaaggtgtgaactccgactgaagcccttcccacactcctcacacttgtatggtttttctccagtgtgaactctctgatggccttgaaggtatgaatttcgactgaaccccttcccacattcctcacatttataaggtttttctccagtgtggactctctgatgggcttgaagatatgaactccgactgaatcccttatcacattcctcgcatttataaggtttctctcctgtgtggactctctgatgaacattcagaactgatctatgattgaaacctttgccgcatatattgcatttgtatggcttctgtccagtgtggactctctgatgatctttaagttttgagctccagttgaagccattcccatgctccttacgtggtttctctccaatgtgaatttttggatgaccttgaagatataaattatggctgaagctgttactacacacatagcgtttatatggttgttccttagtgtggactatctgaaggtcctgaaaatgtgaggccagactgaagccattaccacactcctcagaattatatgaattctcttccatatgaaccctatgctgaatgtcaagatttgaactacaaatgaaactctttccatactctatatctgtgtatagtttctcttcagtgtggattttttgatggacttgaagacatgaactctgattaaagacattctcattttcctcatattcatggggttcatccctagtatggaccctaaaaatactattaaggtctaagctatgactgaaggctttctcataaatgttgtgcctataggacatctcacctgtgtggataagttcataagtgttaagaggggaacagtgattgaagttctcaccatattcaccacatttgcatggtttctcctctgtatgcactctctgataggatttcagatgtgaattctcaatatcatcttctctctcaatattttgatgaatatgaagaagtgaactataattacagccctttccacatgaactgtatgtatagggcttcccttccaagtggaactgctgatgaacctcagagctggagtcattactgaaggcttttctatacccagtacatggatagggcttctcctctgtttgaattgactcctgattaagtaatgataccttcatgatatcttctccacagtcatggcagctgtagttttcttttctgtgtacttccagtttatcattgtgatgtgagagccaactgacactgtcacacttacagaaatgatttttcatggaaatttgctgacatctacactgataattatgtgactctttcagatacattttcctccaagaatgatgtgccctccaagatggatacccttgactttttatataattggagccattccctatatgagtgaatatatagttcttatcttcagaaatctgaactggtattcctgcccaaacctggccgagggaattaccttgttcttgcaactgagaattcttcccttgaaaaactttcaggaaatcttgacacctgattaacccacctgcactttgttgccaggtctgacgggaggaaagctctttgggggaaaagtagcttactgttacttcctgaatactctccatcttttgttgattcttccttcctataaggataaagagaattcagatgtgcacgagtgaatgctttattcaagagatttgaagattttacacttaggtcataacatgaaacttgaatgaaccagaggaaaattcatgccactatttctaagaatacttagaaaatatctcctctttggctataccagttacaggttgagtattctcaatccaaaaatctgaaatgtgaaatgctccaaaatccaaaacttttttaatgttctacatgatgttcaaaggaaatactcattggagtatttcagatttctgattagggatgctcaactggtaagtataatgcaaatactctaaaatctgaaaatatttgaaatacaaaacacttctggtcccaagcattttggagaagggatatttaacctacatacaaatagcatctacataattcaggatatctgatgcctcaaaatcaggactttgcagcacgacctggacatcgaacatgatggctgtgttcaaaaggcttagtaaaaccataaacatggctgggcatggtggctcatgcctgtaaccctagcactttgggaggccaagtcgggtggatcacctgaagtcaggagtttgagaccagcctggccaacatggtgaaaccccatctctactaaaagtacaaaaattagccaggcgtggtgttgcacacctgtagtccccgttactgaggaggctgaggcaggagaataacttgaacccatgaggcagaggttgcagtgagctaagatcatgccactgcactccagcctaggcaacagaatgagatcctgtctcaaacgaaacaaaacaacacaactataaacatgttatcatggattaatcatgggtttccaggagatctgaaggggaaaagaggatgttcttaaaactggaaaaatatagttgcaaatggacaaacgccttttgtcctaataagtttttcttttttgtctggcacataaacatgataatgttgttcatttgtaagtgtactgtgtgcgttaaatgatatgctgaagaaggtaaatacagacttttactttatgtttgaggcatcacatatcctgtcactaatgagctatttatcctcatgagaataataagctcttcttcagattatgagactaacgcgctgccagctgcgctaagagggcttagagaataataagctcttctaagtccctgtaggccattacagattttaactcttttcaaaagatatttcacaattatcaacggccatggtgtaggtcaaaatgtgaaagactgtgacagaattcaactaaaaaaatcagaaaaaaattatggcacctgtaggtgtcctctgaggtgctcattagccaggaacagaactcaatgaatactgacttttgcttgtgccattttactggaaaattatgttagtgtttaggaaatttgaggcaccagaaagggttgaagacaggatatttgggtagaaatagttacctagttattaaagctcagattataagcagacagcagatcttcatatactagtgacaaatatcctccctaaggacaactggttaaacagggttgaattaataacatgcattcttctaacacttagaagtagattaagtctctataatatccagaagaaaagcagtaaaagggatgttttttcatgaatattaccctcaaacataattctgccttatttctttgtgtttgtctgcctctccacactggaatgtattatccatgaaaacaaacactgttttgtgcactgcattcctttcactgccaagtgaacagtagttgctcaataaacattgatgaataaatcatagtttgagttgctctcactcatagaactaaaagagcatgtaatgtagctttttaaatgggaaaggaactggtgatggtggcaactttgctggaaagctgaaaggctataggagacgtagggcgacaattcagagtgatactgctgatgagaaaagcaaaggtcacaagaatctactgtggatgaaataaaaatgtaagatcaaaaagacccataggcagggcctgtggattgagtctttctcatttttaaagtaactttttaaatggtacaactgtgagccaggcatggtgacgcaatcctgtagacccagctactcagaaagctgaggcaggagaaatgcttgagcccaggcatctgaggatgcagtgacctattaatataattgcacctgtgaacagccactgcaactccagcctgggcagcatggcaagactctgtctcaaaaaaacccaaaatggtgtaatttttcttgaacaaaatcttacccgtaagccctaccctatcccaacttttaaaaaaggaaaaaagaaaaggccacactgatgaatctgtatcactaggctctggggcagcacactgattgtgggataacacttcaaggtatatcagtaggtatgcatcttggtactttaaaagcacatttactgatgtctttgccttctcaaaagtgaagctttcagttattataatgatattttatcatataatgatgaaatgaagggatatattataggaggcatatcagataaagtatatagcttatatgtgagaagtttgagcttccagctagggttaatcataatccttgtagttttgttttactattataaaaaacactcaatatacatccataaagatacagtttaatatgtcctgtcttttgggactgatgtagtggcttgagaacatgaaagtagcttgttagtcaaaacccaatttctcacaaagcaactgtttcaatgcaaattagtacataattcatgatataaaaatctctcaaatatatgagattaaagtttctctctgagcagtgggttttgcaatgttaaggacatagaggaagaaaaaaaataaaaggtcatttcactttgtttcacactcttctaaaaaagaccacacatgtaacaacattaatttcctttagtcaatggtatagaccgaaacaccttgttactttatttaaataactcaacatttaagttctatttcaatatcaatggtagaatggtaataagaaattgtgttaagtttataaatgaactttatttgatggagaaactaagcatgacaaaagatgccgaagacatcatttgaggtaagaaggttgagaatttattacatcttcatagcaatcctgctttagcacttagaggttgagaaagtcaatgattcaagcaacccaaattgatcaattcaataacaaaggtgctatatttgtcataaagacaagtaattcctttgaatttaatagttagctataatgaactcagagaaaaaaaatctttgtttatgtcttcttcttcttcttctttaataaaagctaagcgagaacatcagctcaggttacccaggctgagatcaccttccgttcttacttcgcttttagatagagacaatacaaggtatagtggtgacaatgttttgatcacaaatatttaagctgctgtgctgactcctttcttaaccactgatatggtttcgctctgcgtccccacccaaatctcatgttgaattgtaattcccagtgttggagttgaggcctggtgggaggtgattggatcatgggggtgctttctaatggtttagcaccatcccccaagtgctgtctcgtgacagagttctcaagagatctggttgtttgaaagcatgtagcacttcctgccctctttctcttcctctttctctgccatgtaaaacatgcctccttccccttcaccatctgccatatttataagtttcctgaggcctccccagccatgcttcctgtatagcctatggaaccatgagtcaattaaacctcttttctttataaattacctggtctcaggtagttctttacagcaatgggagaatggacgaataaagaaaattggtaccagaaaagtggggcattgctataaagatacctgaaaacgtggaagtcactttggaaacaggtaatgggcagaggttgtaataatttggagggttcagaagaagacaggaagatgagggaaagtttggaatctcctagagaattgttacatggttttgaacaaaatacggatagtgatatggacagtgaagtccaggctgaggtggtctcagatggagatgaggaagttattggggactggaactggtgatatatttagatatatttaggtttgtaaatgcatttatacattttcccaacattggtgctatgctttagcaaagagactggcagcattatgcctctgctccaaagatctgtggaactttgaacttgatagggatgatttaggttatctggtggaataaatttctaagcagcaaagcattcaagatgtggtctggctgcttctaacagcatatgctcatatttatgggcaaagagattatctgaaactggaacttatatttaaaaaagaagcagagcataaaaatttgaaaaatttgcagcctgatcatgtggtagaaaagaaaaaccaattttctggggagaaattcaaggctgcagaaatgtgcctaagtaaagaggagctgaatgttaatagccaagaaaatggggaaaatgcctccagggcatttcagagccagtcatgacagtccctcctaccacaggcctgaaggcctaggagggaaaaatagttctgtggctcaggcccagggccctgctgttttctacagctgaaggacacggcaccctgcattgtagctgctccagttccagccatggctaaaaggggccaaggtatagctcaggccattgcttcagagggtgcaaaccccaagccttggcagcttccacgtactgttgggcctgtggtgtgcagagggcaagagctgaggcttgggaacctctgcccagatttcagaggatttatagaaacacctggatgtccaggcagaagtctgctgcaggggtggagccctcatggagaacctctactaggtcaatggagaagggaaatgtggggttggagcccccagagtccccactgaggcattgcctagtggagctgtgagaagagggccaccgtcctccagaccccagacccaccaacagcttccaccacgtgcctggaaaagatgcaggcactcaacgccagctcatgaaaatagccaagtgggctataccctgcagagccacagaggcagagatgcccaaggccttgggagctcatcccttgcatcagcatgcctggatgtgagacatggagtcaaaggagattattttcgaactctgagatttaatgactgccctgctgggtttcagattggcatggggcctgcagcccctttgttttgcctgatttctccctttcagaatgggggcatttacccaaaggctgtagccccattgtatcttggaagtaactagtttgtttattagagtattatgcatccattacaaaaacaagagttataatcttagactgggagggatttccccaaggtaacggcaaagaagaaaaattagtatattaaaaacaagaatgtacataacaaatttttacattaatatgaggtatatgatcatgttagtataggtaaaaaaattaaggtattttaaaaggtgacattatgttccagctgacagtatcaggaaggtagactggcacagcatggcctcggcctgtttctgtacaacccaggagccaagaacgctttctacatttttaaagtggtgtaagaaaaacaaagactgtgacaaagagcacatgtggccaggaaaatctaaagtatttactacttggacctttagagaaaaagtttaactcctactctcaagggtaccatgtaggaccctgaatcttaaccaagatggaaacaaaccattatagaaatgagttaatttgttttgaattttctgttgactctttcttcttatccagcagcatccttagctacacagttgcgacggtggcttttgatgtcagtcttgaggactcaagaaactatcaaaatgtttggattcacataaatgtccaacttgaagattctactttaagactgtggctatgtcaagagattgtttgggtgcgagagtatgggacagaatgggaggataagaagatggacatatgaatacaagggtgtctcacttgaaaatgctgcatgaggaagaccagttataatgttggcattggtcatttttgatacttactttagctgattggctattcttatcttttaggattaatggctacccatctatgaatactcaaggacagctaagcagttaaaacaggcatccatcagatgagaaacagtattctagaatacccttcaattacacagatttattctacacctattagctgcctcagggtgaattgaagagagcaaagatcatgcatctattacccaattcattcagagagaaaagcaagtcaaggaaattgacacagaagcataattgagaggtctgagggggcaatcatggggcagtgcctctgaaacagactgaatgagcaaaaacaaacaatggtaggtgaatatggaaagtgagaagaggttgaggggacagataccttaggacctaatagaccactttaagtactttaaacttactatgtgtgaaatggggagccacaggaaagcttaaacagagaagtgatgtgttctgactcatgttctagaaggggctccctggctgctgtgttcctgcagcacagttctcacctgaacatccatctcttggggtttctgtctccaccatcaaaagcttttcttctctctccagctgggatattaggtctggcttgaagggctgatgtgctgtaaagaaggaaaggacagcaaaagtttttaagtttgatgacattcaattggtcaaaactagacaaaaaggtatacacagacaagtgagactctctcccacatcccttccaccctgttaccttccactcactataagaaactaacttcatgattttcttttttttttttttaaataggctctcacttttctgcctgtgccagcatgcagtggcatgatcacagctcactacaactgcagcctcaacccctgggctcaagcaatcctcccacctgggcctccagagtagccgggaccatgggtgtgcatcattatgcccagctaaattttttgtagagacagggtctccctgcattgcccaggctggtcctgaactcctgggttcaagcaatcctcttgccttggcctcccaaagtgctgagattacaggtgtgagccaccacgcctggccattattttcattaaaccttccttcttgtgtttcttcttataaaaataagtatatatataaaatatatattatttttatatattacatatatttttatatatattatatatatttcatatatgtataaaatatatatatattttgtatatgtataaaatatatatacattttgtatatgtgtaaaatatatattattatatatattttatatataataatatatataatatatattttatatataataatatatattatatatatatgtctgtacccacacactgtctatttacttattttaccttatttcttacatgaattgtagtatactattaatattcttttggacatggctatttttagggaaaatccccagaaatgggttgccggggaagggtaaatacctagctttgttagatattgtcaacttcccctccctaagggttgtatcattttgcattcttcctttcaacgcatgaatgttcttcattccccacagctttgccaaaaaacgtatagtgttacgtttttgaatttttgccaatttcatgggtgagaaatggcatttcagtataattgtaatgaacatttcttttgaaataaactgaacatctattcatatgtatacatatttctatgtgtgtatatgtgtatgtatatacatacacatacacacacacacacacacacacacacacacacacacaccctagctctatgtcctgagacaaagaaacatagatcatagatactacagtgaccatacctagcatccagactttggcattaaataccattccccagttaaaaaaaaaaaaaaaaaaaaagataattccagagccaaggcaaagtaaagatgagcacaaaatactgttctctgccaacaaagtaagaaagtgctcaaaaaaaaaattggggacatgttacaaggtcacaggagccagcttaaagaggccaaacttgggacaattttaacatctaaaaaattacagtaataaactataaacctttaaaaaatttcacaaatccctacaaataacattgaaatgatgcttgagaagtggggggctcttgttgactgcaagtttatgccaggtgctgactgctaaatgggaaggaggtaaagttagaaaagtcatcattttgtaactgtcatggtaaggaccagataaggcaagatcatcagcaggtgcttaatctacaggaaaatacttgtgttacccgatgattacaaatggggaaaaaagcagtaattatatagtggggaaactgcataacatcgtgactgggtaatcaaagttaacaccacctttgagggacagatgacttcacgtgcctccagatgtgattccctcaaaagtgcacactctacctacatagtgttcctgctgcatggatcatctgaatctaattttgtggaatcattaggaatgttctattaaaaataagggaagaggtgatagcgttcttcaaaaatgttactgtcataaaagagaaagaaatgctgtggaaatgttctaaattaaagaaggctaaagagacagaacaactatactagactctagatcctgttctggagggagaaaaatatgctttaaagaataaaattaggctggtcgtggtgactcatgcctgtaatcccagcactttgggaggctgaggcaggtggatcacctgaggccaggagtttgagaccagtgtggccaacatggtgaaacctcatctctaataaaaatataaaaattagctgggcatggtggtagttgcctgtaatctcagctacaggtggctgaggcacgagaatcacttgaatctgggaggcagaggattcagtgagctgaggttgcaccactgcactccagcctgggcaacagagtgagactctgtctcaaaagaaaaaatatatatataaaattggctttatggataaaatcacagcataaatgatagataagataaaaacattatatctgtcctgagaacaggtaagagaatattcctctttttataaaacagactgtgcagtaaaggaaagagttagttttgtttaaagagagatctggattttgcctttggcttctggagaaggtaatcgctaagtccctggaatatactgcccgattagagtgtctttcgtttacccagaagccttgggccacacaccagatagttaaacaatgtgatttatagtaggggctttgagccatgtggtattagcttaacctctggagaaactggaatctaagagcagccacccaggtggtcaatcatatctaggtaactaagctccagtaaaaactctggacaccaaggctcaaatgagcctctctggctggcaatgctccttacgtattgtcatacttcactgctgggaagtcagtgctgtccacaactccacggaagatgacaagtggaagctgacatctggaacgctcctggactctgcctcctgggcctcttccctaggctgactttaatctgattcctttccctgtaatgaatcattaactgtgaagacaactgctttcagtgagttctgtgagtccttctagtgaattattgagcctgagtgtggggctcagtactcttgggtcttggggactcctaatcttgcaattggtatcagaggtgagagtgaacttggggactcctgaactctgtatatacactgaagtatttagagaaaaacggccatggtatattaacttaccctcaagtcgttcagaaaaagatattatgactatatatattttttcatatacatacataagtatgtatggagagggaaagaacatgaacataaatgatagagcaaatagggtaaaatgttattagaggtgaatccaggtagaatcttggcgaatctatatgggtgttcttgtccttttgtaagttttctgtgagtttaaagttatttacaaatataatgtttttttaaaaaaacccctctaaaaagtcaagttcatcaacagttactggtgccctgaaaaataaacttactaacctggaacaacttactaaactgtttgatggcaaatcaatgaagcaggaccatatttactattccaaggatagactggacaaaaccatcagaaacatcttgtctgtgttgcacggggattattaggactctcgggcacctaatctcagagaataatttcaggggcttcagagtttctaacaattgagcacacaaagacaccccaggaggctgccattgagtaactaagggcacctatcctcacctactaagagcaggttcctgaagttctccagcatcacatctcggtacagcttcctctggacagagtccagcagccccagctcctcctcagtgaagaccacagcaacatccttgaatgtcaccatctcctacaatgccaaacacatgcacactaagtttacagaagaagggcagtgctgagaaggtgtaaaggactggaagctgttctggagtctgggcaacttgagtcacatttacatagttctcttctgtttaccttctgtaatgctaataccattcaccaaaagggctgcaagaaaagaaatccttgcactttgaaattacttccttttgttagcacttataagtaagcctctggaactctgttgcaccctaggttaccaatattttaaattgtaataataatgtcatttgctccacaaaagctttagttctaacagtgactgatgctacctgtttctcctcatttacacacacacacatcacttatttaatttgtcaaatttacagggtatcagtcatccttactgctcaaatatgtagctcatcctctgtgctcatctggagactgctgcagtgatgggcacagctctggagcctgactgcctgtgtctggatctgggcgctctgcccaatgctagctctatgatcttggacaagtttcctatcttctcatttgtatggtgaaacttataccatacagtcctagtaataaaatgagtgaccacatgtaaagcatggaaaacagcacctggcacacagtaagtacccaacaaatgttagctacattattaatattttcattatatcttctatcccatttctgggctgcaaagtaattcagagaactaatggtctagaatataataatttgatccaactaatgcacacttagtttgaggttacctatacgaacaatgttgcaaaaacaatcttttgcattgacgttaacctctggaattctgttgattatctcctcaaaataaataccaaaaagtaacaatggcaatgctgaagaataatgacctttaaagttctgaaatcataatggcaggtgttttcccaaaacagactttcgccttccatcttagccttcttccaagaaagtataaatcatagtcaacactggatatgaaagctttttaaaaaaatctttcataatctcacaagtaaatttgggaagtaaaaatcatttattaaaaacattctcacaaacttattggtaataaagttcattctctttacacacatttgctgttcatctcgatttcttgttttgtaataataattcatttggaggacaccgaggtcttttcttccatggacattgtaaatatttttcattccactttgctgtcttgtaactttttgctgtagggtaattttaaatttttaaatgaacaactgttcagtcccatatttcttctggctgcagttctgagcataacagcttcagctctgaatgcagaactctgctttggtttgctttgcttttttgtaagtctttccacgcaagtgatatgcctgaaactcttggcccagaaagcaaaggctttagagttggcccaatgcttatcttcctgtatgaacatgaacctcttaacagtgcaaacgactctacagttcccctccaacagtcatctggggccatgaatagtgtgacagatgcaaagtgcctatatatcctatggtatgactaaaaactttaaactaagtacctgtattactctaataaaattaatacatgaataatgaaacacacacagacatacaaacatatatagataaacacatagctataggtactgagaagaatctagctcttcttatataagaatctagctcttcttgtacaaaaacatctatttttcccccaaccttagcttcaatataatcttgttagacaaaatcatattttatgtattccacctgagacatcacttaggagaaaatatttttagttttgagtctctagaacattatggacaaataatatcaaaattctctcacactggtttttgagtcaagattatttgtaggaaaactgatactgcaatgtaaaactgcaagaatcctcag[138 bp omitted]tggtgaaaccccatctctactaaaaatacaaaaaaatagctcggtgtggtggcaggcacctgtaatcccagctactcgggaggctgaggcagagaattgctggaatccaggaggtggagggtgcagtgagccgagatcatgccactgcattccagcctgggcaacagagcgagactccatctcaaaaaaaaaaaagaaaaagaaaaagaaaagggggagagggataacaacagtttacgtcaataatattagatgataaaaattaactgctaaaaattaagcggataaaaattcaaaattgttatgtattaatgcaagaacagttatatttaaaaaaatgaccatggacaaaaacagatttgtaagcagggtaataaggtgtaggattttaaaatttctattcttctttgtactattatttatgaaataaataataaaacacatttacaactaaaaggaaattttagaaaaggacaaaaacaaaaagcaagagcctgatacataaatgatactaaatgcctgttgtcattctttacccttggcaaagaagggggaaaaagatatgtccactcactgcaaaatgaggtcacatgtaaaacggcataaatgaaaaccagctcacctggaatttggtcatttttctctttctttttctagagaaaggcagagacctgagaaggcagaacagggtaatacgaaagaagccatgattaaaagggaaacgtatctttgtgcaaattagaaaaaggtgtcccttcccccagcagatgtggccacacaccggcgttaaggagcaggtagcatgggttggattctagctaccacttggctctcctggcagggtgcccgcatgcacggagcaacctgcacagctgtacccagtagcctcacatgccttacagctcccagcatgctcattctgattctgggagaggtgggaaaggagaggtagtggcatgtcatgtactggttaaaagtggactctggggacaaaatgtctacgttcaaaacctggtgctaccatatacttgctgagtaaccatggttaaattcatgaacctttctaatgtttcagttctgtcatctgcaaaatccagaccacacagtgccaacaatatatgattgttattaggattatctgtgtgcatagaggaaacctattataactataccagggatctctacttccttgcaactatagagatgcagataccattctgtatcacaaaattgccctggcgaatgtattttgtaagacatctggacagcagagattactgctctgtcccgggaaagtcacccgtaacttcggaatgtctgtagctctggcttcttacttttgttgccacagtatatactatatacatcgagaccacccttatgaaaaatgcagtggctagtaaatattcttcctgagctcaggggaagttcagtggtacatccctcttcccacagggtacaacaaaagactaatgaaacctgtgagactactacatttctcatgttaaacaaaaatgtgatcctctgtctagatatgacaaaatctcattggtgatgagaacacctagcctgcagggttgtttgtggggctgcgtgtgctcctctgtgaaaagcagctcagtgcttgaccctggggaggactggacaccaggagtttaatttcatggttcttcctcaaggtttgttactttactttacttactgttctcaggcaacattaaggctatctgtggaagagaaagaactgaaaaaaataaaaaaggaactgaaaatgaactgtgggtaaggcagagccttctagcaccacctcaaagagaggtgcactactccagtaggcacctgctccctcctgccccacctggcctctgctgtagaatccacaggatgtaagcacaactaccaagaacaagtatgaacttggctgcgtaatcagcagtaaaagagctgagttttctttcactcatccaatatttatggattgccttctaaaagggatacagtgcccagatagatgccagggtagagggtgcacggagtcctttgagagagcatggaagggccctcaaatccatacatgatgatggaggatggatgaggatggagaaaatgagggctgatcttaatgttggaaggtgactgacctatatttgccactcaaagagaaaggagtcatcagactattgaaacagaatgagagttagtgggtatctagggcaagagagaaggcagaaaatgtaagaagaccaactcacatgctttagaggaactccctcacttaatcccacaaccacccaagaagttgggacaatttgtaactctttttacagttgagaatactgaggcattaatattttaagctgctttgtcattttagctagcagaatggccaggactattagtccagggtctgtgttctcagttactaggacagtggctcttaagctgccagctcaccggtatcaatggggagctttaaaaaaaaccaatgcccagacccaagtccaggctctataaatgaggatctgtggaagaagagtttttatgaaatcccccaggtgactacagtgtgcagagaggattgcaaaccacagaccaggacatacatagagacagtttgcaggataagcccatgcaattaaccactaggccatttggcctctcaagaaaattgtcagagaacactcaagccaggaacagagaagggcctgggagccaggcctcttgattcccagatccccatttctctcttttaaatgatgttcttggagctgtcactaagaggaaggagcagtaacatgcgctgtgggtgtctgcagtcacgcactccgtgtgaggacagccttccagtttagacctctctgatcacctttatcaagcagggggtcactaatcagccaagggactttgagaattcaaaagaaaagggaatttctgttaaatatgaaatcacacagtggtcatcctatagactattgttgcttcttcatgtttgatagaattaaagcctgattatgttcctttcttggttaaaacaagtgcatagctgcctttgggataaagtctagattcttagcaagccacacaggaatctttcatgtctgtctgctcattttctctgcaaatcttctctcccctttgatctccagccgtgtcaatcacttgatctcataaaagagtctccaggcccttgcatgtgccacccctcctgcactcctttctcttttcacttagagcaggggttggaaagctttcataaaaaggacagatagtgagtatttcaggctttgtgggtcacatgctgtctctgtccaatattgttctttcttttcacaacccttcaaatgtaaaaatcattcttagctgaagaagagacacacaaaaacaagccacaggcaatttgcccactcccatcacagatcctcttagcttttaacactgagcttgtatgtgccccgctctgtgatacctttaagaaggtttcgctgaagcctcattagctcctaaaacccattttgccagcctaatgaaagcggaatgctttggccaagagcccaggctacagaatcaagctgccaagcttcaatcctgactctaccacttactggcagcataaactgacacacattaattaacctctcaatgcctctgttcttcatctgtaaaatggagataaacgttgggttgttatgttatgttatgtgagttcaatgcatcataatattagaaagtcagtgtgagtggtaataaaatctgatcaatgttagccattgttactaccatcttcattatcatcactatgaaataaatctagaagctgctcattagctctggtttgttgcaaagtatgtttattttaggtcagtaattaaccatataggtgtacatcaccctttcaacattctgaaaaatctattggcttcagcatcccaccaaaactgatcagagataagggacagggaatattcacatcttttattctcccacatctattttcagaaaatttgaatatactctcactgagttgaaggtccccattcctgctgcctgctggaaagctgcaccaaccacagagagttaccaaataattcctctctgccaatccctacgtttggtaataagcaaatggagaatttgacacagttcccgctgcacagaaatctgtagccaaatgggaaagacagatcagaaataagcagcagaagcatctgcgagctcaaagacaggtcaacagaaacaatcaaacctgaagcacatgaaaacaatgtgcattctgttgttgatagagtgctctacaaatgtcaacgaggtcaagatgttaatagtattattcaggtcttttgaatccttactggttttcagtcttcttgttctactgattactgataaaagagtgttgagatttctacatagaactgtgggtttctctatttttttcttttaattatatcagtttttcttcatgtaactgttgttttgtaggtacacttttaggattgttatgtctactcggggaactgacccttggcatggtgtccctcggcatccctggccttggtctgaagtctactttgatattaatatagccactccgtagtacagctccttttcactttttcactttcaaactatttatgtccttgtatttaaatggagttattttagaccacatatacttggttcttgctttttatccaatcttacaatatattttaattgatgtattcaggccattagcatttcctataattattgatatagctgggtttctgtctaccattttattatcttttttcctgtttgtcctccctgattttgtccctctattacccctttttctgccttcttttgggttgatttttttttttttttttttttactattccattcattgtatctattagcttttggctatatgtcctttttttttttttccagtggttgctctagggttgtaatatacatatctaatctttcacagtgtatttagcattactgttttactactttttgtaaaatgcagatgccttaccaacaaatagtttcctttatctccccactttgtttcatttgtatatactactctatatacacaaaaacctctagccaagaaagttataatttttatttaaacagtcatgcatattttaaagagtagaaaaccagtattttatatttgccaaaaaacttactatttctggtgctctttcatcatttctgaagttcctagtttccatttaatatcatttctattcagcctaaagaacttcctttagtgctccttttagcacagatgtggcattttttcatttcattcctgaaggacattttcactggatatagaattttgtactgacaactcctttaagaatattaaagatgtttttccaatgttttctggcctccatggcttcccatgagaaatccacgtatatctgaatcattgttctaccagatatataatatgtcattttctctagctgtattcaagaatttttgtttatttttaattttcagaagtttgattatgatgtatccagaagtgattttctctgagtttatcgtatttggtattcaacgagtttctggaatctgtaaatttatgtctctcaccaaatttgggcaattttcagctagtacttccaaacaaacacttctctcctctcctcctgagactccaaagacaggaatattagacttctgatattgtcccacaggttccgaaggctctgctcatttatttttcaattttttttctctctgttgctcaaattgcatttttatactaacctatcttcaagttcactgattcttttttctgtcatctccagtctgctactgagcccatcgaataatttttttttacttcagatgttatctttttcataaaacaaatcttaatttcctaagaattcaaatcaaagtattttctctaactataacagatttaaagtagaaatgaacaagaaaaaatatctggacaatctccaaatgtttggaaattaagcagcatacttctaagcaaccaatgaaattagtcacaaaagaaattagatgcagtgaagtggaaatgcttcttagaaaataaattagagcatattttaaatggaatcaagacttaaatgcaacatatcaaaatgtaagagatgcagctaaagcagatattatagggaaatgtatagcaatgatgcatatattagaaaagaggtcttaaaggcaaacagaaaaaaaggacgtagtaaacctaagacagaaatcaatgaaattaaaaacacaaaaacactagacaaaatcaagcctatcaaaatatggctgggccaaatccagcccactgcttgtttctgtacaggatgtaagctaagaacggcttttactttttaatggttgaaaaaaatcctgaaaagattattttgtgatgtgacaattacatgaaactcaaatttcagtgtccataaagttttactgtaacacagccatgctcatttgtttacgtacggcctatggctgcttttgcattacagcagcagtgctatgtagttataacagagttcataggtggcactctcatttcttcatattgttgctaagcacaatttaaaccactgtgactcagcattaggttaactcaattgggttaaatgctgttaattgaacagcatttcaagtaacatatgtattgctgtaccacaacattttaatttttgtattactaatacacactcttcaagccaaacacaagaaaaaaaaacagaaaaacagactttgttacactttgaaggcacaatggaggtgaaatattttgtgaatgaattagatggcaaagcttatcatgcttattgtgcttcctatgcagtgacaacgtatctatgctaaactaatcaaacctatgtcaacactgtcacgctaagcactcatcacaatattctcaattcacaataaatggtccgaaaaattagaaaattttaaataaaatgtctcatcagagcagaatttcttcacaaaaaaaataatgaaaatgaggtagcaactacagtacattttgatattcagatattcagcttctatttctgccccaagcaaggaaagtaatttaccagtgatgaattaattaaatcatgtttgattgcagaaggcaaagaaatgtatccagataaaataaatttgtttatgattagtagactttgggcaagaccaactgctctaagagttgaggacaatgggaacaacattatggtccattaaaatacaagggaaatgattctgataaatttatttggctcttgatttcacagatgttactaatgttgctcagatattgtgtattcaaggaatcaatgccaagtttgagtggttgaatggttagcctctaggaacagtcgatatggaacaaccacaggtgaaaatattaccaaagaaggtacaaatactaattcagtaaacctgaggcagtacaatctgctaagaagtgttaaaattgatagtggtaaaagatatgttggagcagaaaaaggcagaggttggatttataaaaacatgtatttaaagcctatggttactcattgtattcttcatcagcaggtactttgcagagaatattttaatctatcatgtgctattgaaccactagtggcaacagtgaacttcattcaaactcaaagatttaaccatcatcagttgcatgaatttcatgagaaacagaaaaattctgacttgccctaccacatgagagttcaatgtctgagcagcaatgaagttttattgtgattttttttaaatctcagggctgagactgaaatatttctgaataagaacttccctcaagcattactattgatataatactgaatgacattggaaattagctttagctgcagacttgataatgcttcttaatgaactcgacctaaaattaaaaggcaaaacagtacttatttgtgaagcttatagtgtaggaaagttatttcaaagacagttaatgtctgaatcacaggtaatgctaagccactttacaaatttccagtgctgtcaaaagttaaaacaagtaatatctcaattcccacacaaatttgtagtatatatgttatctgagcccaaacttcagaattgtagcagtgttttcagaccttgatgcaagcgcaaaggacctttctgcatttcaaagtccatttcattgtacactgcataattctcctaaccttccattgaaagtgattattctgaaatgtagtgacatactaaaaggtaaatatcaagagtctacagtaattctttaaatgtcttctgtattagtttctattgctgctataataaattaccacaaacttggtggcttaaaataatgcaatttattctttattagttatggagatcagaagtctaaaatcagtttccttgggttaaagtcaaggtgtcagcagggctggttgcttctcataggaatccatttccttgccttttctaacttctagaggctgctggaattccttggcttatggctgcagcactccaatttctgcttctgttatcatgtcactttcttctaattttgatccttctgcttttctcttataagaatccttgtaattacactgggcccaaccagataatccaggataatctacacatcttaaactccctaagtttaatcacaccagtaaatatctcataccatgtgaagtaacattcataagctctgggaattaggatatggacatctttagggagccactattcagtttaccacatctttcaactcattgatattcacaattaaaatcatttgcttatggattagtatcagtatttcataggacctatttgtttaaaaaatttcttttcaaagataaaatacataaaatctcattacaaatcagcattaacagatgaacatttacagtcaattttgatgacaaggaatagcaaccttgaacttcaattaagttgtactcaatcattatatcttaaattttgtcaattaaagtttcctctcattatataaatacctaaataatagtactgatatttctagttaactggaaaaactaaaatatttacaatctgggcctaaaaaaataggtttgctggctcctggacaaaattaattcaacccacaggcggttctttgcaaagattagtaaaaattaaactcctgatgaagaacaaaagagaaaagacacaaattaccaaaatcaagaatgaaagaagggatatcactacggacttaacaggcattagaaatataaatgaattaacattaatgaattcaaagtgatagatgaaatggtttaattccttcaaagacacaaaacacaaaatactgatgtgagaaatcaaagagaaaaatgaaaaaaatcactcaaaattctacatactgcattgatttgttcacgtgatgttatggaaaaggcaatggggttggggagtgaaccaggggtttcctggggttaagagttggggaagagtttgactacaaaaaggtaccacaaggggatgtttctgggcgatggaactgttgtgaatcttgattgtggtggtgaagtctacatgacaatgcaattgtcaaaactcagaaatgtacaccaaaaagaataaatttctactataagtagataagttaaaaaataaatgttaaaaaattaaataaggctgttctacaggtacttgtcaaacttttaagtgcacagcaatcaccagctccagtaaaagtgaagcagaaaaagcatttgacaaaatacaacatccactcatgacagaacttttgcagactaaaaatataatggaacttataaaaatgctttcccctatgatcaggaacaaggcagagatgtgtactcttgacataactattcaacactgtactgaaaatcagccagtgtagtgaggcaaggaaaagaaataaaaagcatacagattagaaaggaagaaataaaactgaccctattaatacacaacatgtgtctctgtggaaaatcccaaggaatctaccaaaaaacaaaaatttctagtgagtatagcaaagtcagagaatacaaggtcaatgcacaaaaatcaggtgtatttctatacactaacaatgtacaactggaaaccaaaattttaaaacaatatgatttaaaatagctctagaagaataaattatatattatactcgggcatatgtctaaacaaaacatgtatagatctgtatgcagaaaatcatgaaacactaatgcaagaaattaaagaacacttaaatgaagggacatgttatatcaatgaactggaaaactcaatgtgataaagacggatctactgattttacataatgtcaatgaaaataccagctgaatttttggtagatataaataagctgattctaaaatgcatatggaaaggcaaaggaaccagaatagctaaaagcaattttggaaaaaaagaataaatttggaagaatcaaactatccagtcttaagatttactatcaagctacagtaaatatgatatcttggtactggtgaagagatacacacatagatcaatttagcagaacatggtacagaaataaacccaaacaagtggtgttgggatggttggtcattcatatgtaaagaaataaaacccaacttaaccatcacatattataaaaaaagttaaaatggatcacagatttaagtgtaaaaccataaaacttctagaacaagagaaaatcttcacgacctggggctaggcagacttcttagatatgacatcaaaagcacaatccaaaaaagataacattgataaattagatgtaattaaaattagaaattttgttctgcaaaagacactattaagagaatgaaaagacaagctacaggctgagaaggaatatttgcaaatcacacatccaacaaaggacttatatccagaatatataaatagctctcaaaaatcaacaataggaaaaatataacccaatgtaaaactgggcaaagcatgcatacagacacttccgcaaagaagatataaggatggcaaagaaacaataacaaaaaaagaaatatctgctgaacaccattagccattagggaaatgtaaattaaagtcacaatgcttagaatggctaaaataaaaaaaaataaggaaaatactaagtgctgatgaagatgtaaataaactggaactttctacatcattagtgagaatgcaaaatggtacagatactacagtttggcatcttataaagttaaacatacattccccatatgatccagtaaccacactcctggcttcgtaccctacagaaataagcacaaaaaaaactgtacatgaatgtttatatcagctctattcataaatgccaaaaagtggaggaaaaagtctatcaaccagagaatagataaactgtgatacatccataaagtggacacttctgttaaccagaagtaaacagaaatgaagtattgatacgtataacaactttgatgaatgtcaagagcaatttgctgagtaaaagaatccggtctcaaatgttaacatatagcatcagttcatttatacgacattctcaaaaagacaaaactatagcgttttagtggttatggtagttgccagtggttacaggtatggtgaggggtaattatgagggaagacatgaggggagtttttggggtgatggaactgttctttttctgactacggtagtcgttatacaaactatgcctgtgttgtaatagaattgtataccaaaaataacaaaatagtcaatgtcactgtaaaaacattttttaaaaacctgttttaaaaacctggaaacacaacctcagttataaggcatggtctataaatgttgttaccatttctaacaatttgtttcttaggaatttttttagattatcaaaacataaccaatcattgctcttcaactcttcaatactctgaaatagttggtggattatataacctaccaatattaagtgagattaaggaatatatccaggggttatttctattctattttgatacctaattccaattccacactgcaaatccttgatgccagctgtctgttgagtagctactctaaccataaacccttaacaaccttgtacgatgtgctgggcacatggagaaaagtatgacatggtcccagaaatagaagaactttcagtgtatggatttagataaagagaaataagaaacaaagagctataagacttaggcaaggcaaactctatactggaacacaaaattcatcaccatccttctccaaggtacaattctcttgcatcccctagcttcctcaagtaaggaccattctgtaagcttcaacgaatgaaaaccttagagtagctgctggcatttccctttcaaagtcttggatataagcaatttatgatcatcaacgtttggcaattatgacaatcaatcaaacgatattatactaagtcgatgttagagatttgctttaaaatactgaaacaaaaaaaaaagggacagggagttgatacaagactggcaaatgttaacaaaggttgaagctgggtgacgcttccacagaattattttagtcatattacatttggctatgcttacaaatttccatagtaaaaacttaagggaaaaataaaagctatgaagcctatttggttaaacatgggtgaaaatccaaaaagaagtctactggaagaggaaaacattgaaatattaatattgttactgttatatcttgtggttagcataatttttttcttttacactttctatactttcttaatcttttacaatatgcaataatttatataatcagaatatgaactataaatatttcaaataaaattaaattacagataattttaaaaaatcaaaaattcaaagcttattaaccttgctttcacggtcctctagtaaaatccaaatatgtgttctgaagctgatactaaacacatcaagaactaaggcaatggatggaaactatttgaattcaaatcccagctcaggctcttaccacctgggtgacctaaagataaaccacctatgctctatgtctgtttgcttatctttaaaatgggaatggtggtacccaacccaggctcaaagggctcttgtgaggattaaagatgttaattcatatcaaactcttagaatgatcagcactaaatgtttaaatactatctttattactcatgcccaagtactccctcatccgtttctgcatttattgaacaaatatcagcgcatcttcgagcagaatttgccagtgaatgatggaaatatcgtcttccctgaaaagaaaggatgataagtactactcaggtgagactccgctgccaagtgccaaagggtcattccctccttctccctgcagcctttttcaagaagtcaaggctaaagaaggaaaggaggatgggggaaatcagaactcctgcatgaattacaatggactacccagacagccaggagtgatcctgtcctaaagaaaaatctctcagtgatcagaaaagggccagggatactctgcagctggagctctgaccccatcctgggttcacagaagctttcagggaactgagtccttctcagaaaattaaaaagtgctaataacaagagacccatcttctaccacctgtcaggctctgttccaagtctttttatttaactctcaaaagaactccattagatagatactagtaccattttaaagaaaaagaaacataggcagagagattaagatactcgcctgttattatactgctaggaagtggcagagctggttgatggtcaggggaaagggctggggaagtacagaacccaggagatccccagtccctgcgatgtaggatcttggacccccggcgctaagtggggatgcgccagctgccccacactggagaaggctcattcaaagataacacaaatcccgcccttcgccgcaagtggattatcctcccctagagctactgcccggttgctactggaccccaacaaaacgaacatcagtatggacggaaggagcaggaagcagggcggggagcgctcacctttctgggaggaacgaaggccgcggcctagcgtacctggggcggaagtggctctgcctaccgagacctcctggactacgcttcccagaattcccgacgggatcagggagacggcctcagcctcctagagcggaagttacccgactacacggggctcccaaactacatttcccagaattcctagaaaaactctccacttatctgcctgcctaggacgcaagtaccgggtgccaagctgagagcctggatgatatttcacatgtgccggtcccaaaggaattccttaactcccccttcctggaaccgaaatgcttccaaagacagagagctcgtatatatatttctctgttttacccagcggaccgtgcatgaaaggcgcctttcctggcgcgtgtgtctctgaccctgtggatcttctggacaattcccggaatttcttgcagggtagcactttcccttaagtcgtctctttctcgtttggatagtcagtatttgtatagtcactattctcttttggttagccatccaattttatactgctagtccagttctactgccttccccctagagtttgaatttatttttcttcaaacgcgacacaaacccaaataaactcaaccaaagcggactttacctacctacctacctacttaccaagaaaatatcccataaaggagagaacagagaagcttgcaatacaggaagaaaaaagaaaagaattacagaatggaagcgatgtgtgcgctaaaaatgcaggtacttaaaggaaattgggctgatttgtactggacaccgaatttaaggaatacaggatctcaacctttctttgactcgattacctttttattccattttggtgtggacgcgtctgaaactgatagtgctgctgctacctaccataatgtgtttgttgcaagatccacaagaacgtggatgccaagaatccacaaaaaaacagatgcaaccgttgatgaggccataagcagaaacagtaaatggttcccacgtttcctctgctttaactactgatgatgaaatgcaagtcataaggcaaatagaagggctgtactgatacagacaaaatgttattattatgggaagggataagtctcttgtaaaacctcgaaatttttttcttctttgagaaaaatctatcacctattttcaccctgctcttgatatagcaaatattgtaagttgtcttatggaggacaggatgattcagggaggacggtgaatgggttgactcaatccagaaaaggaagaggaaaataaaaagacataacgaccaatctgtgaaaatgctcacggggtcaggagatcgagaccatcctggctaacatggtgaaaccccgtctctacaaaaaatacaaaaaattagccgggcgtggtggcgggcacctgtagtcccagctactcgggaggctgaggcaggagaatggcgtgaacccgggaggcggagcttgcagtgagccgagatcgcaccactgcactccagcctgggcaacagagcgagactccgtctcaaaagaaaaaaaaaaagacactattaagagatgagactatttgattctttatttaacaactcctttccaaggaaatgtttctgaaaatacatacggtttacatattaaagaggatcaatctgataataggggatttttttttataaaatgaaaggaaattttaaaaataaaagggacagaataatactttgtgtacttccacttccagtaataataaaatgagtgatttggaacaaacatctggcagaggaaagatgagcaaactttttaaatgtcaaaaggcatcaaaagacaagataatggagaaatggtgggccaaaattcagaaacacttgggagagtcatgcatttggggctacttttctcctggggatgatggtctagtttaggatctgaaaagcctagaagctctgcagcacttttgacacctatatgaagctgggggaacaaaagattctagcaaaaactaaaattcgcatcttttcaagtgcacataagatttgcacaaattagcaaaatgatacgggatttcaaaatactgaaatactaaatatgcttttgaatacaatgaaatttggctagaaatcaataaaaatacaactaaatgattcatgtgtgcatttaataaatattgtctcatctccaaacccaccattcttcactctgctttatggggctggaatgggggaatctgcagccaatctttcccgacctccacacccccaatctggttctgtgttgggcaattattagcagaagcgtataggggtggtgggggcagggagatatactatatcctgtgcctgccaaccagcagtactttttcttgtagcaactgcctaattttcagtttttctaacacttgaataacctatttcatcatggctctttgtaaacattattaaacaacttcccaaagactgatccttagatgtctaagtcctaacactgcagggccctgcttttgagctcagagacagcagaaccagcccaacattgacctctcctcagaggtctgagtttcaggtgagcatgaccttccttcaagcttctaagttttagtaattctggtctcttcactttgtttcctcagacctcaggtggttgctgcttgctgcagttgctatttcctgcagttgctgcttccatcatatattagagttcttttttttttttttttttttttttttttttgagagtctcgctctgttccccgggctgaagtgcagtggtgccatctcggttcactgcaacctctgcctctcggcttcaagcaattctcctgccccagcctcccgagtagctgggattacaggcatgcgccaccacgcccagctaatttttgtattatcagtagagatggggtttcaccacattggccaggctggtgttgaactcctgacctcgtgatccacccgcctcagcctcccaaagtgctggcattacaggcgtgagccactgcatgtggcctacagttctttttctgctctttcagaaatctagctaccaactctacaatatgctaatttttcttttcaaataattgataaggtttctatcttctcagtggaccctaaattacaaacttgtttagaaattaatcaaaccacttttaagtaatccatagataaaagactgtggcattgaaatttggtgtcatcagtgaattctaccaaatatttaaagaagaaaccatgttcatctcaaaattattcctgagaataacaaaataggaaacactttccaactaactttatgaggccactgtaataacactgacaaaatttgtgagaggcttcattagaatggaaaatgacaggtctggccaggcacggtggctcatgcctgtaatcccagcactttgtggggctaaggcaagcagatcatgagatcaggagatccagaccattctggctaacacagtgaaaccccgtttctactaaaaatacaaaaaaaaagccgggcatggtggcacgtgcctgtattcccagttatttgggaggctgaggtgggagaatcgcttgaacctgggagatggagattgcagtgagctgagatcgtgccactgcactccagcctgggtgacagaggagactccatctcaagaaaaaaaaaaagaaaagaaaaaagaaagaaaaagaaaatgacaggtctatctcgtcataaatatactttcaaaaatgctaaacaaaatgttgccaatgatatataaaagggcaacctaggtatcagagaaaaaaaaagtttgattaatcacccatttatcataagaaaatttaggcaactaagcaatagtaaagatctacaaaaatggcaacaaatatcaaaaggaatagtgaaatattgaaaacatttcctctatgatggggaacaaaataatgatgtccaccccaatcatttctactaaataccacatttgctcctttatcctgcaatcttgccaactaatctaattaattttaatattttatgtgtagatcttttgaattttatatgcatgctcatgttgacttcagatctgcaacaaatggggcgctgcagcaacatgggaacagggaaaatattcaatacatgttgctgttaaattgagtattgtgaaataaaactgaaattgacctatacctcccactatatgcaacaatctaaggctggtggattgtagagcccgatttgaaaagcatttcttatgacacttaaatctactcagtgtataaacctataagaaatgtgtaccaaaatacacatataagaatgttcatagcaggatcattcatcacaatgacatgctgagaatactccagatgtctatcgatgatagtatggataaatatttttgttatttacacaaggtaaaagcaaggacattgaacaaactttagctgtacatgcaataccatgatgactcccataaatatgttgagcaaaataactagacaaacccagtagatgcagtgtgattccacttgtacgaagttcattagacatgcaaaattcatcaataggatgattttggacacttaaatagtaaaaatatgaagaaaagcaagggaatcttaaaacttagggtagtggtttctttttatggggaagaaagcatcatgatgctgtgagagtggggtgtttgcaattctaccatgcttcaatttttgttgtgggtggtgattatacagctgttcattttatattcatactttcacatgtatatttatgattcagacacttttctgaatgtgagtgatatttcaatctgtaaaatcaatgatatatgaccaacaaactgtggtgcatcaatacaatagagtattattcagccataaaaagaaatgagatatgaagttatgaaaacacatggaataaccttaaattcatattgttaatggaaagcagccagtctgtcaaagctacgtactgtaattcaactatatgataatctggaaaaggcaaaactaaaggtcagtaaagtgatcagtggttgttagaggttcagggagattaattgatagagcacagggtatttttaagcagtgacactattctgtgtgatacagtatggttgatataggacattatgctttgtcaaaacccatggaatgtacaacacaaagagtaagccctaatgtaaaccacagactttaataataatgtatcaaaattggttcattagttgtaataaatatgccacacacatgcaagatgcaaacaataggagaaactgggcaggggaaaggagagtatatgggaaatattaatactttctcagtttttctgagcagttttctgtaaccctaaaactgctcttaaaataaagtctattttaaaaaatcaatgatatgtttcaaaggaaactgaatatatggcatagaactttttcagaacttagagggaagggctaaaaataatgagaaactctataatgaatatgaacatactgatcaggtgtatcttataagctaatgagaaaaaatgaggattagagaaggaagcagattgtaataaataaatcattaagaaagaataaacaatttatccacatgggcaaaatctcatattggaaggaggagaagaagatggaggagaagggggaggaaggtgagggtatgtaggaggaggagaagtaggaggaggaagagtaagagaaaaaggaggaagagactcgtagagatgcacttgcagacattgagaaattttttaatggcaaggctgaagactaaagaattgagtcaatttcaaaggaatgaaaaaataagctttgcattttaattattgtctgcaacattaaaagtactaataaaatataaaaataatctatgggatttttgaggtgaaaagattgatccttctatggtcagagaatgttttgttcatgtgcactattcttggcatacaagattcagttgtgaatcacttctaaattctttccggaaaatattcttcaagacatattacaggcctttgacaacaacacagataaagcgtccacagaccgtcttcctagtttatttacatagaaatgctggataaaatgtgaatgtgaaaatatcatttatttgaataggagaatgtttgagggcacacatattaaaaagaaaaagaaaaaaagaaacagatattatttatttgttccattatatcccccactacccactctcattttctcccctgccgcatcagtaaccaggtcgatctgtttaatgtgtgcctgttgttggtatgtctttctggcaaaatgtgtggaatttcggatgcatatatatatatcttgtgttataaaactctgttaaaaattttcactcaaaactgtttttctcaatattttactaaaaaaaattttttttgaagacagggtcttaccttgtcacctaggctagagtgcagtggtatgatcacagttcactgcagccttgaccaactgggctcaagccatcttcccacctcagcctccaaagtagctgggactatagttgtgcccaatcacacatggctaatttttttttttttttgcaaagatggggtcccactatgttgcccaggctggtctcaaactcctggcctcaagtgatcctcccaccttggcctcctaaagtgctggcattgtaggcatgagccactgtgcctagccctgaaattttataacataaagaagagttggaagaattatacagtagtcacccatatattctcagcttagatactaaaattagcaacatttatgtcttagccatctatctagctatcttattacttatccatcagaacattaacattaccccacaaattccctcatgacactttccagtcagtctctaaccccttcccccagtggcaaccactgttctactttttcaccataaattttactaattttagaatatgaaatatatggaaccatacggtaagaactcttctgtattacaattctttgagtatagtgtttttcagatccatccatgttgatgcacatattagtcatttgatcctgaagtgatgttctattgtatgaatataagtctttggaaacttgcttacattttaattgtttaaatatttttatgaataaagatcctgcagcatacttataaaagtctttttgcgtgcatgtgctttcttttctctggaataaatatctatgattagaattgcttgatgtgtttaactgcttaagaaaccaccagatcatctcccaaaagattaattttacactgtctcccaaaatatatgcaatttctgattgttttgaatcctaataagcatttgctgttattagtatttttttttgagatggagtttcactcttgtcatgcaggctggagtgcggtggcatgatcttggctcactgcaacctctgcctcctgggttcaagcgatcctcctgcctcagcctcctgagtagctgggattacaggcacctgccaccatgcctggctaatttttgtatttttagtagagacagggtttctccatgttggccaggctggtctcgaacttctgaccttggatgatctgcccacctcggcctcccaaagtactggaattacaggtgtgagccaccatgcctggcctgttatcagtatttttaatatctgccattctggtgatcttgtagttgtatctctctgcagttttcatttgctttttcctgatgacaaataatgtcacacttctccatgggctatattaacaatttgtatgtcttcctttgtaaagtaactgttcaaattttgcccattataattgagatgttgggctctttaatattgtattgtacaagtctttatatattctgggtgtcagtcagtctgaaatttgggcagagtttaatgtagaataaggggcaattctttgcttgacatctttttccctggatttcttccctcactttccaggtcctgtggtcacctcaatctctgtcatctagatcttcaagccagtggatactacagaagcatccacagattcaatgaaacagggatcaaaaatattcagaaaaaaaaatacaaattagcaacacaacaataaaaataacacaaataaaaaacccaatacagtataacaactatttacatggcatttttattgtatagggatggaaataatttgaattatacagggtgatatgaaaaggttagatgagactactatggccattttacataacagacttgaacatccgcggattttgatttccataagggtccctgaaccaattccccacggacaccaagggactactgtattcaggattttttcacctagtgcatgaaggatattcatctgtagttttctttccttataatttctttgtcttgtttggtattatcagattaatgctggcctcatgagacaagctgggggtgggtgggtgttcccttcccttttcgtttctgggtttatttaaaattcacatctttactctttaaatgtttagtagaatccaccaatgaattaatctcaatattggtttttttattgttgttgttggaaggctttatctattaatcagttttgaaatatatatcaggccaggcaggtgcagtgtctcaagcctgtaatcccagcactttgggaggccaaggtgggtagagcacttgagcccaggagttcaagaccagcccaggcaacttggtaaaaaaccacctctacaaaagatacaaaaaattagctgctcactgtggtgtgaacctctagttccagctactcaggaggctgaggtgaggtgggaggatcaactgaacctgggagttcgaggctgcagtgagctgtgatcatgcctctgcactccagcctgtgtgacacagcaagaccctctctcaaaaaaaattatatatatatatatttatgtgtgtgtgtgtaaaaattgtatacacacacacacatacatacactcaactatctaggttatcctagatatttctttttgagtgaactttggtagtttgtgcctttcaagtaatattccatgtcatgtaaattgatgaatttatggacaaagagttgtttgtaatgttcctttataatccttttaatatctgcaaaatctgtaataatgttccctccctcctgatttttgttttcttctttttccccgttggtgagtcagttgaaaggtttataaactatattgatcttctcaaagaataaggttatgattttgttgatttttaaagattgtttttctgtttccaatttcattgacttatgtagctgccacaaaacttcactctatcctctccaggacccagctgggctcaagaattaaattaacataacacagattaacaggagaaaagcatgcaaatttatttaatacaagttttacacgtgaccagagccttcattacaaaatgaagctccaaagaaacagtcagttatgtatacactgtagtgaacaaagaatagtaagttgttaagaagcaattaggccaggcctggtggctctcgcttgtaaccccagcactttgggagacagaggcaggaggatagcttgtagccaggagtttgagaccatcctgggcaacacagtaagactgcatctctacaaaataaaaataaatttaaatttttttcttttttaaaaaagaagcaactaaatcatgcggagaggcttgaaagatgttattttaaggtggtctgtacagaattcttttgggcttgacttctcattttgaggaaaagtatattgctccttttttttccagtataaggaggggatcttctttcctccttcccaccctccctccttccttcctacctcttcccacagacgtgctagcagaatgtgctaattagtaaatatcttctgccctgagaagagagatgacacggcaagaagaaggatgctaagtcacactcagttaaggttctgctgctaggagccaaagagtcattctttcctcattcctgtgaccatctgcgagaaatcagaactgtgtctccctcctgcacgaatcacagaggacatcccgatacaatagcctggagtgattcccgccccattccccccacccccacttttttaaaaagggaatccaggaatcgtcctgcttcctgtagggatcagaaagaaggggcaaaatagcactgcaggtggaactctgatttcttcccaggctcatagaagctttcaggtaactggggcttctcgggaaattaaaaaaaaaaaattaataaaatgaaccacacttaccaccttttacttgtgactatctcatttaattctccactcaactgcatcagtttggtactactattccccttatgttacataaaaggaatgctaggcacatacagtttgaattacttcccaatttcacacccctagaaggtggcagaactgcctggtcagtcctggagtaggaacagagcgcacaaaatacaagagatcctcaacccgccaagaccaaatgctgcaaactcgacaaaggctcactcacctggggcccaaccccatcttccactgctagccgcggatgctcttctcgaagacaaggagggccgccgccaggctaaacgaaacattgctgtctcaggcctcactcaacttcctgaaaggaatgatgacctcactttcatggagcggaagtgactgtagttacccacaattcctggattataaccccagaattcccaatgagataatcgtcacagccacgccctcctgtagcggaagcccggccgcctacacagagctccaaggttactgctcccagaatcctcgcaaagaattggcaatgtcgttgcctttctctggcggaaggctggctactaccctttgaatttggaatgtatgtcacacagttctagagtagaatgcaaactcagcactgtcctctttgaaccaaaatgtctccaaaaacaagattctaatttatacttaatatttcccccagaagcccaatcattaaagccacctttccaggaacagaagtgtttttgacactgtgaatgctttggaccagtttccagaatcctcttcaggtagtgcttctcaccagcgtttccctttttattttggataactaggttcagtccgaatcattctatctcactggtcaagctcagccttcttcttccttattctcattttttttctttcacatgtgacaaaacaaatgcatttgaacgcccctcccaccctgtctcccacccaaatccctttagtagagaacacagtttgaaatgaaaaggaggcatagattataaaggggaagatatgtgtaagcaaaaaatgcagaacttagaaactgggcacgaatgtaaggaatacaagatctcaaacctactttgactggattttctactttattccatgtgttttggatgcatctagaactcttggcagtgttatctgatatatgctattcattccatgatacaagaaccacaagaaggtcatgcaaagtttattaaagtataaagcagaagcagcaaaagcttttgggtgttccttgactttaattgctcattgtaaaacgtggctcatgaggcgaatgaaaggaggtgtgttcatgtgaaggaattattataatatgaaaagagataaatatataaaaatttgaaatatctttttgttcaagttcaagcatcacatcacccacttccaccctattcttattatcataaatacaatgataactgaagaatatgaaaaccagtgagaccatatttcgttcaagtgagtcgattgagagttggacgcaaatccagaaaacccaacaaataaaaatacacgaaggttctgcttaccacttttcttctggacaagaactaaacattttcatacctttatgttatgaaaaatttcaaacattgatagaaataaagagtgaagtattccattgcctcatcacccagattcagcaattttcaacatgtgccacacttcctttatctatcaatattgtctttctgccctttttgttattgtaattttaaaacaaaatcatgacactgtattatttccccctaaacactcccatgcatacttcaaagaattacattttctaatataacaaaaatacaactgtcacactgaagaaagttaataattccttaatattattttatgccctaaaaaacaaaacttcagaatttccagtcatctcaaaaatgtccatcctttgcatgtgatcgttttgtctcttgagtctctttcaatctggaagagtatcccccctttgatccactttaaattcatgcttttggcatatacaagacatcaggtcagttgtcaagtaagatgtcccacattctggatttttaaaaatgtttcattatgctgtcagttaacattttcttgaatatcttctgtggctctggtaaactacaatttagatttagaaagcagatgagattaagtttcatcgttttcggcaagaatacttctccataggtaggtttattttggccttgttcagtagcatcaccttctccttagtgcagatcacagcacattcttgaatattactgtttcctacagcacctaagatactacacctcaatcatgcacaaatgtccattagaagaagaacaaggttaaaagagtttgagggaaagggtgaagactttaggaatcaaaattttttctctttcaattgctaatctcatcctattaagcatccatagtcttgcaaagtgtgaaagaaaaataaatctcgggacccccaaatcaccaagccagagggaaaagtcaagctgggaactgtgtcaggcaaacctcccatttgattacttaataagatagctgtaaagcagaaaaagctacatacctccttcacaatttgtccacaggggcctgtttgtgggcctgaacatctttatccaaaagcatttctgttgaatttcaccctggtaatgtaaattgatagcttatcttcacaggtgtgggataaaggacagacagaactcaaagtcattcctctgttcacctgaaacaaatgcatatctgattgcttcctcttccctattgtttatgtagtaatgcagattcactaagcaacattaagacctaagtcactattcgtctacccacctctcacttgtgagttttgtattcagtaaaaggctaatcagagcctcaaaataatgccactgtttgtctcttatctacctatgatatagaagctcccactcccattcgagattgtcctgcctttctggacttaagcaatgtataacttacacatactgtttgatgcctgatttctccctaaaatgtataaaatcaagctgtgccctgaccactttgggcacatgttgtcaggacctcctaaggctgtgtcacaggtgtgtacttaaccttggcaaactaaatgttctaaattcattgagacctgtctcacatacttttgggttcacaaaagtatgctttagtgaacacccatgtccatttgttcttgatctttaaatgagtgttaccataatataaattccttgaatggagacccttgaatctaagagtatgcacagtgcatagagtcatattaccaaacctatcccaaaacaagtgatctgattgactgagccaatagtatttgagagcattttccccccaaaatagatgccatgaattgaaatatcccctttcatggcatgtttaaaatacttctaccattgcacataccgacttatcaaagttatctggtctctgatctctgtacctctaaagcaatgcttcccagccaaggtcacatacactgagaaagtgtctcacaaataacttttaagtgataactgataccaaatcttatgttatttaaaaacaaaaacagaggcaagtcaatattcctcacataatagcatcactggtgcctgaactgaagttcactctctagagtaggagaccaaaagatgattttaaagctgctgggccaggtaatatacttaacctgtagcctttgggacatatgctattgactggctcacagagcatccattcataatccctttgaccctgcatgtctcttctataaaattatgggggaaaatcaaaatactttcttaatgttccttaagtctatggttgtcatgggacaatattttgaaacaattagatgtaagtgtcagtcttctgtttatactagaaagaagagaaaagatttggttggtattgaggatatgagatgaacaagggatattgaaaatgcagtaggatcaatgaattgtagaaattgatgaagtcaatatgacagtaaaccataggaagatctggcaagagaatatgtagagcagactgtaatgccttaaatggagactatggagggattgcagctattgctaatttaaggcctatagtatgaccatggaaatgaataccccaagtaggatagacaaaaaagacgaccagaggcatggaagtcagtatatatctcttaaattgtaaaacatttcatatatacataaaactatgagaataatttttaaacacatcccagatgcccaggtttaacaagtgcaaattcactcaatagaatacaacacaatcattaaagatgaacgttatgaagaacgtgggaaacagcaaaattaacttatggtatattactaactgaaatactaatttaaaatttacacattatttaataaaaagcacatctctacataagtataaaataaaccaaaatgaaaatgttacatgagggtggtgctagtaggattataggtaagtcctaacttagttctgaacttacttgtaatgaggtcctgccacttaaaaaaaaaaaaaaagttccagacacttttaaaaagccatatttattgaagtgcaatgtacatacattataaaggctactatttttaagtgtatagttcaatgagttttaacaaatatgtacagacatgtaactaccaacacaatcaagttgcagaatatttccaacgcttcaaaaacttcccaaggaagcggcaatgctgattggtgggtccaacagaagggctacgggagtacaggacccaagaaaccatcaaacccaatgatgcaagaccctgcctcattccccagcctgggactcgggaacctcccgtaacactggaaagctctactgagtcgagggaaacgcaaacatttccaaccctaatcctccaccggctgccacttttcctcctcaagacagagggccttgaccatctttggtccctcacccaggctgaggaggcgcagaagggtctctaaggctcaagtcttgcatgcagcatgatggccgcaactttccctggagcggaagttcctgcgactcacttcccagagtcaggagtcacaccagagggccacaccctgtagtcccgaagaggaagtgttgtcgactatatgaaacgtctgacccacacttcccagaatgtttaagcggaacgacgacaaggactccaccagcctgggcgaaaatacttccgactacagttcccagaatacccagcacgctagtgcttccaccttcctacagctcattctgttagttaagtgcgttcaaactgaaggtcacttctgtggcgcgattagtgcttggactttttatttttgtaatttttttttcctcaagaaaaaacgagtatgtggaaatataaagaaagtatgactatttggggataaaagcaaaggctttagtatgaaaagaaacacgctttagcggaaaagtgatgagtatgagaaaaaacaagattctaaaagggagttgggctgtccactggacagaaccttaaggaatatggaatctccagacgtggtttaactccgttgcctctttatatgtgcctgtagtcatctagacctctgcttatgctatctggcatggacaatttatttcaagatgacaagaatccacaaggaattccaaggacaaatcagtcttgaaatcaagcacagaaagagcaagttgtatctgaaaaatgaaggaagctgtactggcaggaaatttagaaaatatgatatggaaaatggctcctttcttgaaattttttgagttcaaatcaggcttggaattggctattcctctgttgcccgttgacctcatatatttaacatgaacgtatcttttctacaaatcagtttaagccatgtgaatttatggttattcaggaagaggtgggtaggttgagatgggagacggactccagataactataacaagtcaaactacaggaagtatgtacttaccactttccttctgggcaggaaaaaaaatttttaatgaaactttcgatattaacacaaaaaggcggagcttgcagtgagctgagatcacgccactgcactccagcctgggcgacagaggagactccgtctcaaaaaaaataatagtaataaataaaaaaaaaagaaaaaaggaaatgataacatgaaacaccaaatgcacctaccctaaattcaacacttcccaacattttgccacacaggcaatatctatgactattgaattttgttactgaaatattttaaagcagatccctggccttatcccttcccaatactatctgtatcacttaaaaataatgatgttttaacataaccacaaaaccgttaccttatgagataaaattaacaaatcttagtattatctaatatgcatgccaatttgaatctgttttttggggggaaaatgcttttacagctggtttattccagtcattatccgaacattttgatccattgtatttgattgttatctcaccagaaagtcatttactctaaaactatgcccccaccccgaccctcccacacacagcaccaccaccaccattttttatttccttgaactgttggggaaataaaaatgtcaaattaggtgtctaaattctggatttgtctaaagccttccctatattttctcctctgctcttttaaatgttctgtaaagtagaaatttgatgtaaagtctagattaaatgcaagttattggtttttgcaatacttcatagaagggactggaaatatttgaaacagaaaccatattctcttcaactaaagtcaattcaaatcctcagcaagtttccctctgaagagaaagacaaaaataaataacagcaaatatgcaaaaagagacagattaaaatatggaaaccatcataacaaatcagattctagacttgagtacaatggctcatacctgtaatctccagcactttgggaggctgaggtgggaggactgcttgagtcaaggagtttgagaccagcctgggcaatattgtaagaccttgtctctgcaaaaaatccattaaggtaagctaggtatttgagaccacttttatctcaaaaaaagtttgaggtggaatttgccaattccttatggtaaaaacctgagaagctgatagttggagtctaggac[137 bp omitted]agtgaaaccctgtctctactaaaaatacaaaaattagccgggtgtggtggcgcacacctgtagtcccagctactcaggaggctgaggcaggagaatcacttcaacccgggaagcagagg[134 bp omitted]agctgaatgggaagtaggcccaacctggcagttattcaaacccaaatccaagtcaactcaatccctgaccctgtattgcttgtaaatctggcaaaaataaataaaatcctctgtagagatcctaagcatccaattattttttaaactttttattttaaaataatcacagatttatatgaaattgcaaagatagtagaaagaggtcccatgtacccttcacccagtttcacccagtgattatactgtccttaattaaaatacaacattgaaaccagggaattatattgacaccatgaatatgtgtagttgtatgttatcacttgtagattgatatagctactaccacaatcaagataaataagtattccatcactgcaaagccctccttcttgctacatcttgatagtcacacccagtcccctcccttccaccattcctgatatctggaagcaactaatctgctttccatttctataatttggtaatttcaagaatgttatacaactagaaccataaaatagattcacgtttttcacttagcataattatcttaagacccatctaagttgtgtatcaatagtccattcctttttattgctgagtagtattccacggtatggatgtaccacagtttgtttaacatttacctattaaggaacattttagttgtttccactttttttccattatgaataaagctactatgaacattcatgtacaggtttgtgtgcatttgtttgtgtatgtaagttttcatttctctggagaatatgtccaggagtgaagttatggggttgtaaggtaaggataggtttaattttttaaggaactgccaaactgttttctggagtggctctactactttacattcccaacagaaatttatgagacttcgagtctctttacatccttgccagaatttgacattgttgctattttttattttagctgttctaatagatgtgtagtgatatttcattgtggtcttgatttatatttccctaatgactaatgatgttgattatctttgcatgtgcttctttgtcatatgtatatctttttcattgaagtgtttgtttaaatcttttagcttaaaaaattggattgttttcttattgagttttgagagttctttatatgttctctatacaagacttttgcatatacatgatttgcaaatagtctatcactccctagctggtcttttcatatctgtgtaagagttatgattttatttttcgaaaattatttttttaacagttttgggggtcccacagagatgccaaatagattcatgtaacgaatccaggtaatgtttgtcaccagaaaattacacctcagtgatggtcttaagcccagttgcattgtttcttggctcccagaggtaaatacaaagtgacaatagaaatttgttgatcctctgtttttcgcattttaattttcttctaattttgtgtttcatttttgttttgttttgtgttcacttatagctgataaattttcaccatcactggcaacaataattgggaattttttatgatcttgtttttaaagtgactatcagtgctgctcccaaggttctcaagtttttaagaaactgtccttgtcaaaaggcttatagtcttagacaaatttatatggacacatttcttcagctgctgcaaaatatgattcaactaactcatcatcagtaaataacttttcttgcttgactaacagattagccactctaaaacttactttggttatagcctcattttcattcgctgttttttaaaagtaattcggctttgataagatattccattttggccataattatctgtgatttggaaatattgggaaaagtttctaatctggcagtattaatgttattatttttcttcttgtacagctatctgtcactgcaaaacaaacacaatagtcagccgtctgattctataacaaaataatctacactttactataccttaaaagcataacattcaaaatttgattttctcttcttgttttgacatgatggatatgcaaaataaatgaaatatcaagtagagtgatacatatggcactcaaaaatctgttaacttgtaataactgtgttactgaggtttatgatacactgagtagcagtatgaagtgatgagaacattatatatggtctctatcataagtactcaactgtaccaatataacatgaaaacagccatagacaatatgtaaacaaataagcatgactgtgtttcaaccaaaatttatgaatgctgaaatttgaattttacatacttatcatatgtcataaaatattcttcttttgatttttttgactatttaaaaatgtaggctgggtgcggtggctcacacctgtaatcccagcactttgggaggccaaggagggcagaatgcttgagctcaggagtttgagaccagcctgggcaacatggtaaaaccccatctccacaaaaatgcaaaaattagctggacatggtggtgcatgcttatagtcccagctactcaggaagttaaggtaagaggattctttgatcccaggaggctgatgctgcagtgagccaagataatgccactgcactccagcctgggcgatggagtgagaccctgtctcaataaaaaatgtaaaagccattattacttcatggggcatacaaaaacagtcaatacaccatatttagccattaggccagaatttcccagcaactggcttactctgtcttacccagaaccagaattccaaattgatctataaagtcaacacaatatcaatcaaatttacagcaggctttttgcagaaactaatattaagatttacgttgaaatgcaaaaaacaactaactaaaaaaactagaatagtcaaaattgttttgaaaaggaagaacatcattagaggaataacagtatcagattttaaaacttactctaaagctccagtagtcaagacatagtaatggcttaacaatatttatataaatcaatggaacagggtgattccagaaaatagagccaagtatatatgatcagtttattttcagtgcagccacaaagataattcaatgggggaaagttgtttaaaaaaatagcactagaacaactagacatctatttgaaaattatgaacctcaacacttacctcacatcatacacaaaaagaactcaaaataggtaacagacctaaatgaaaacctaaaactacaaatgttatacaagaaaacataggagaaaattttcaaaaccttgggataggcaaaaaaaagatttcataggtaggccaaaaagagcacaaaatctaatttaaaaagataaaccagaacttcatcaaattaacttactctcttaaagacattattaacaaaatgaagaggcaagccaagactaggaaaaaatattcataatgtatctatctgagaaaggattggtatctaggctatattaagaaatcttacaactcatcattttttatggctgcatagtattccatggtgtatatgtgccacattttcttaatccagtttatcattgttggacatttgggttggttccaagtctttgctattgtgaatagtgctgcaataaacatacgtgtgcatgtgtctttatagcagcatgatttataatccattgggtatatacccagtagccataaaaaatgatgagttcatgtcctttgtagggacatggatgaagctggaaaccatcattctcagcaaaccatcgcaaggacaaaaaaccaaacaccgcatattctcactcataggtgggaattgaacaatgagaacacatggacacaggaaggggaacatcacacaccggggcctgttgtggggcggggggaggggggaggggggagggatagcattaggagatatacctaatgttaaatgatgagttactgggtgcagcacaccaacatggcacatgtatacatatgtaaccaacctgcacgttgtgcacatgtaccctaaaacttaaagtataattaaaaaaaagagaaatcttacaactcaacagtaaggaaccaaactaacaaaaaacaagcaaaactttcaaaagttcttttccaaagaagatataaaatgaccaatcagcacatgataaaatgactgataaccacctcattacttatcagggaaatgctaattaaaccacaatgagataacactacaaataatcccaatgactaaaaatcccaagtgttggttagcatgtagaacaagtgatcttgcattcactgctaatggaagtatgaagtggtatagtcatttttagaaatggtaaagttaaacatacacttagcatattcactgttacttgccttgtaccaaaagtataattcttaaag[138 bp omitted]tgatctctgctaaaaatacaaaaactagctgggcatggtggcgggtgcctgtaatcccagctactcaggaggctgaggcaggagaatcacttgaacctgggaggcggatgttgcagtgagccaagatcgtgccactgcattccagcctggtgacagaacaagactctatctcaaaaaaaaaaaaaaaatggtcagagatttcagtaataaacataaaagataggagactccaggaatggatatacctagtgtagtataaatgtgacctttaagatcagtaaataaaaaagggactcatcaataaatgttgaaagccttgactatccaattggaaaaaattaaaattagatttgtgcctgacaccatttaaaacatagtcttcatgttttgaaaataattagtgcctgggagtatgggaaagttttcttttaaaaaatcattatacaaaaatttcataaacacattgatattttaaccacataaatttttttagctaagttgcccagtctagagtgcagtggctattcacagtcacgattgtagcatccaatagcctcaaactcctgccctcaagtgatccttctgcctccccagtaactgggactacaggtatgtgacaggtatgtgccaccacacacagcccaaccacataaagattttaagtgaacaataaagtacctcattctttatgttaatagacaaggacaggcaattcttcataaagataacatacacttagcctatgacagcaattccactcctaggtatttacccaagagaaatcaaagcatatgtctgcaaaaaggctaatacaagaatattcttagtagctttatccaaaatttccaaaacctggaaacaaatgttcaccaacataagaatgagcaaactgtggtaatttcctgattactctgaacataaaaagaagactgataagcataataatataaatgaacttaaaaacattatgttaaatggtggcagcttctatagaaaacagaatggcagatcctgaaaaaattgaaaatacaattaccatatgatccagcaattccacttctgggtatgtgtccaaaagaattgaaagcaaggtcttgaagagatatttgtactcctatgttcataacagcattattcacaatagccaaaaagtggaagaaacccaagtgtacaaaggaagaaaattctgacacattcgacaacacaaataaaccttaaggacattatggtaagttaaataagccagtcacaaaaagacaaatactgggctggtcatggtggctcacgcctgtaatcccggcactctggggggtcgaggcgggcggatcacaaggtcaggagatcgagaccatcctggctaacatggtgaaaccctgtctctactaaaaatacaaaaaattagccgggcgtggcggcatgcgcctgtagtcccagctactcgggaggctgaagcaggaggatggcgtaaaccctggaggcagagcttgcagtgagccgagatctcaccactgcactccagcctgggtgacagagagagactctgtctcaaaaaaaaaaaaaaaagaaaaagaaaaagaaaaagaaaaaaaaaaggacaaatagtgtatgattccatttacgtgactcagagaagtcaaatgcatagagacacaaagtatagtggctgccagtggctgggaggaggggaaaattgagggttgctgttgaatgggatagagttgaatgggatagagttttagttttgcaagataaaatgagttttggagattggttttacaacaatgtaaatgtacttaacactactgagctatatacttaaaaatggttaagatggtaaatttcatgttatgtatatttcaccagaaaaaaattgtaaaaagccgaaagcattccaggtagctctagtttgcatctaagattaagagacatttatttccatcaaaaccaaggatctgaaaggaaccaatttacaagctcacaagttagcctgacagtctcacagatgctggcacaagacaagagactcctggctctgagacaaaggactttattagtcacaaccacagcagtagccagagtgtcatcctttgcaatggtttttaccactctaatcccatagagtgacgtgaaaggccaggtgctgcttgcatacctagcgggctgcgttgtaggaatagaactctaagcttaggaaacctgaatcttctatgataggcagtgggaacaaaaccactgcccttcaccccagagggagacactgtcttcactggagtggtccataaacaaatttgctgctccagaggaagacactatatttttgttccctaacgcgtacgcacctttgaaaagacagtggggaacaaaggtgaccagtgtctctactcaaagacatgcagaaaaagagaagtagatacttaagtaaccatagtgtctgcagaaaaataaaagaaaaaaaataagagaagcagatacagagaatgagtggggaatgaggaataataactaatgttacattctacttcaaagccagttgactacagaagaaaaaggccaattctggggttacatctcctttgtgagtggtatgctaataaatgtttaataaatggctctccagaaagaaacatacgtacattatataagtttactataaattttactaatatagaatgttttcagaacacaatttataaacaataataaaatatgcaatactctatttattataaattacaaatttagaaaaccatgttgaatgaaaaaaaagccaaacgcaagagtatattacagtatgatttcatttatataaagttcaagaataggcaaaaccaacatatggtgatagaaagcaaaacagtgattatatccttttttggaaagaaatgaagggaaaggggcacaagggaaattttggggtaaagaaaatgtttaacatgttgaatgggcattatttacaaggatatgtacatttgttaaaacttaaatgtagttaaagtctgcactttatgtaaattatacctgaaaaaaaagacaagacagatcagacatcttcggtagctgttattatgcttctatgggcagtctagtggaggcatagccactgggcccagtctgccagctgcatgctatttgtatttattgcctgtagttgtatgaagagctagtgttaagtagtgttaagtagtagttatcagtataactgataacccagcatcagttattaaaatgactattatttctccaacatatttcaaggctaataaactaactcactgtatacatgtggatctgtttttgggctcccaattcttttccattgatctattttttctctcctgagcgaataccacactgtattaattatagaaaatttataataaatgttgatctctggtaatgta[136 bp omitted]acctccacctcctgtgctcaagcgattctcctgcctcagcctcctgagtagctgggattacaggtgcctgccactatgcccagctaattttgtgtatttttagtagagacggggtttcactatgttggccaggctggtctcaaactcctgatcttgtgattcagccaccttggcctcccaaagtgctgggattaggactaagttttatagggaaaacatgtaagctaagggtctggaagagaaggcacaggaccacaatttctcataccacttgaagaagcaccagggcctgggtgaagcaggaaatagaccacacctcaccgctatgtttttatccttcttaaagagcaattgtgaaggcatccatgttggtgagggaacaaattgactatgcaggtaatctggactacttaactaaagcagacaatctggctttagttgtcagagcttcacagaagttgcatgagaaagccaggttctaacacctcccatcaggaagagaaagccgctgggaagttgagttcatgtaaagcccttcccactgaagaatgtgggagtctgaggccccagatagctcctcacctaggcatcccaaagggaactcccagaattacctttggacaattctggtcattgcacacaattgttattgtgaatgaaacattttggctacattttataaaagactcttacatagtaatgctatgaattttcacatgccaatttcgtgtgaaaccaatttgttgacccgataattttaaaacagccttcaattggtcaaattttacaggtggatttgaattttataagtaaataacattattctctagcataaaaatagtatcttccttttccttccaatgattatgtctcaacattttttattttgtcttaatctcaccccatgaatctgggccagtgttgtgacttgctttaatcattaaaatgtggtgaaagtatcattgagcctgttccctgatgaggccttaagagatcacagcttttgcccttgaaaccctggcactatgggaccaaccctcgattggtcttctggagggtgagagaccatgatgacagagagaacttcgttgtctcatctatgaccatcataaaacagccaggcccagatgaaccatcagctgactgcagatgcatgtacaaagcccagttaagataatctagcatgtcccacaccagaactgcccagctaagcccagttgaacttgccagctcacacatcatgagctaaataaatatgtatttagagctactcagttcttgtgtgtgttatgaggcagaagctgataagcatatttaggataaattatacatgagcgagtctgttacgcttttatcaaatcattggatttgacatgctcatatttatttaggatctctgcatcttcatttgtaaatgagattggctcccactgattgggagctagactaatttctgctttttccatgctactttgctacaagaggaaaagcaaacaattttgtgaagtagggagacattcctgttagcatcatatatttaaaaagcttaatgtgatatgcaagcgctgctcccggccaaactagaggattgcctgggacacctccaccaacactgagggctgattctgtcatgaaggaatgttgcacccattctaaaccccaaaagcttcctaggataatgtgtatcccggattttttctctaacttaatgtttgcaagtaggagtactggagtatgtggtggacatggacaataacatgtggacatttttataggtctagatcattgttgatggagccatgttattccattatatgggatgccctaatttactcaatctcttatacatgaaccttcaggttgtttacagtcttctcattgcaaaattcttagaacatatttctttctgaaaccatattttccccactcatgtaattacatcctaaaaatacattctgagaagcaggatcattggctcaaagacaatgcacattgtacatatgatacatatagacaagatcctctccagcaactttgtacctgtttttctttcccccaccaacttatgtaagaacactcatttcctcatttctactgacatagaatttttaaaatatttcactattatccacctgatcagtaagaaaatgacacttcagggatggttttatttgcacttgaatggctgttctgtttacaaactataactagcaggaaactgtaatgcaagaaaaactaggaataaaccatgatccaaatgaagaaacctataagtcaattaaaacaaaaaaggacactgtttttgaaggaaaaaaaaaacaccttgtgggatgagtgcagtggcccaaacctgtaatccctgcactttgggaagctgaggtaggaggatcgcttgaaaccagaagtttgagactaacctgggcaacaaagtaagaccccatctctacaagtacaatttttaaagaaaacatcagctgaacacggtggtgtatgtctgtagtcccagctactcaggaggctgaggcaggaggatcactgaagccaggagttcaaggcttcagcgagcaatgatcaggccactgcactccagccacctgggtgacacagcaagaccctgtttccaaaaaaaaaaaaaaaaaaaaaaagcaaagagatctcctctcgaattcatctattatccccaattaaatgacaaatttggggggaaactgacagaaagagcatcctttaaaaacccattattatacaggtctgctgagaagaagactgcatcagtctgcaatgaacactgttggttttttacatgttgttggtcactttagtaaatgttgattttattcaattaattttattaagactaaccacagaacacctattctagttaatttttaatcgcatttaaggtgtgagctgacaaacctattcagcatcccacattatagagtttctctattatatgagatttcttacgtcggtgggttatacttttcagtaaagttttaccacagctatatcatctggaacatttctctttggtgtactcaccaatgaatgaaggttatcactgaagaagtcccatccataccattttagatggttgcactgccacatcaagccttaaagatttaaaagttttgaactctgaattatgttacttctgtatgtggactccaatgacaatgaaacatattgctataaaatccctccatgctagtcaggatagcctaggcaatgctgcagtaataaataaaccaccaaaaatctcagtggtgagacacaatgaacttttatttcttactctaaaaagaaatccaacacagatgaagtagtgaccttctatcaacccagtctggaataagcagcctccaaggtcaccttggcagggatagagaagcctgaggatgtttgtaaaggctagacctgaaagtggcttatatcacttttgctcacactccattggctagaactcaatcacatgggcacactcttaactgcaagggttactgggaaatagacttcttatttgcaaggaaatggaaccagtgtgataaacacagcactgcctctgccacacccttcaaatgccacttctatggagcttcttgcctgtgtagagaatctcatggaaaacctgggtactaacgttctttcatagtaagagcatgggtttcatttttgagcacacttttgaatgttcttcatacagagagtatttttctactggggactaaaaaaaaatctaaagacgttggctgaactgaagaccttaccatgatcatcccaattagaatttccttcctggacacaccctttaatggaaatttgaccactaactacaaccactaccacaaaccacccatttgtcaaaagtaacctctttgccattgtagcatacagcagttgatgggagcttcacagaagttcttgaaatccacagtccttgcctggcacacttcagtgctgcaggctgacattatcgatggcagtgtccctgtcttttgctcccctagccctcccacaggctgagtaagcctctatcatctggaatacagtgtggcttctgttttactaattgaaccctgacttactacatttataatgtttctctctgctcatgtagtctttgatgagtcagaaggtcctttccacgctcacagtgtgtgtactgtgtctcatctatatgcactctctgatgggcaaggaggtatgaattacgactgaagcccttaccacatgccttacacttatagggcctctctcctgtgtggactctgaggtgaacattaagatctgaattccggctgaagcctttaccacactcatcacatttatatggtttctctctgatgtgatctctttgatgtaagtgaaaatatgaactgtaactgaagcactttccacacacttcacatttatatggtttttctccagtgtgaactctctgatgagtgtgaagaacagagctatacgcaaaatcctttccacacacattgcatttgtatggtttctcccctgtgtggactctctggtgaatgtgaaggtgtgtacattggctgaagccctttccacactcaccacacctatatggtttctcccctgtgtgaaacctccagtggacttgaagaacggagcttgaactaaagcacttgccacactcactgcatttgtagggcttctctccagtgtggactctctgatggacaagaaggttggagctctgatcaaagcccttcccacactcttcacatttatagggctttttccctgtgtgtactccctgatgaatacaaagaagtgacctaaatccaaaccctttcccacattcatcgcatttgtagggcatctcccctgtgtggactcgatgatggttgtgaagggaagagctgcgcctgaagcccttgccacattctttacatttgtagggtttgtctcctgaggagactttctgatatctgggaaggtctgagctctgtttgcagcccataggccattcgtggaattcatagggagtcttgccagagtgagttttacaatgaacgataagatcttggctctgactaaagttctttccatactggtcacatttataagatttttctcctaggtgagtgctgtgatggacatgaggatctgtatcatctgcaaaggccaccccacagttattacatgggaaaggctgtggtaatacatgggccgcattacgtttttcaaccgttgatttcatacccaagtttttcccacagctgggatgtctaccagggtcctctcctttacattcttgggactcatgatgatcacatgaggtccaactgaggctgtcatcatgctgagcacgtctgtacaatttctcttccatgtaaattcccttatatcttccctgagagttctggggctcggtcattatgttggctttcctccacgattctggggtaagaacctgtgtcaggctttgccatgctgtgatatcttgatttttgataatggcatttactacatagttttcattttcagaaatctgaagagaaatgcctgcccactcttcactgagggaaacatcttctaaatgtggggaacactcttcttgaaggttcacgatataatcctgactcacagttaaatcccggatcctttgtttccaaatctgccagcaatgaagcacttcttgcgaaaggtaacttaacccctttgcctgaagattcaaaatgttgtttttaatcccgtctcctaggagaagaaagagaatttggctaagagaacaagtcaatcatccatccagaggttttgagaaaatgtaatatgatggggtgggaagttgtccctgggttctattgacgtatgaaacaattagagccacggtaattctaacctgtgagctgccaattagaaatcaagtgttgtagggaaattaaaagaaatcttggccaggtgcagtggctcatgcctgtaacagcaacactttgagaggctgaggtgggaggatcactcaagcccaggagatcaacaccaggctgggcaatataatgagattcccatctctacaaaaaaattaaaaattggctcagttttgcctatgatcccagctacttggaaatctgaggttggaggattgcttaatcctgggaggcacaggttgcagtgagccaagattgtgccactgcattccagcctgggtgacagagcaagacctttccacccccacaccgcaaaaaggaataaaaggaaatcttaggaaaattttatgaaggaagaaattcacctccctgctataagagtagtcgataaaaagcctttaataatcttgctacaaaaggtatgggaaaggctcccattttatgtagtgtgtgtgtatataaataatacatattgatggagtgttttttatatgttgggcagagtaagggacacaaagggtcacaagaggtttcagaaacaagcaacaagtcctatctcctgatggcttcccttccttcacatcactgtcatatggaggactatcacgtatgtttgtgtacaacctgcacaactgtacatgatgagccttaaggggatggggataaaaaggcaatggggattgaaatggggtaaacattgtgaaatatgatcctggcgttgtgcggggatgcgtatgtaaacctctgagacaagctttaagagacatcctttttattttccccaaggttctttgtcttcatgaaaagatagagaccactcagatcctacaatccatttccttaagttctgcccttttaagttgttgcagaatctcagacagccatgactatgaaaatggggaacagatactgtggcactgtcaatggcctggcacccagggaagcaagactgtggtatataacaaacagggggctgaggcagaagaggatgatcatattcttgggatcctaagatgggttccaaaatggcatgaatatcatggtcaagtcccactggatactgcttctggttcaaggtcctttctgcattgttttattgaaagtgactttagtttataagatagtatcagggaaagggagaccatgagctgccccgaatgggctttaagcagtggtttcccaattgttttgattgtaacccacagtaaaatcagcattatgactcagtaggaataggcacgaacatcaacagagactgctcactaaaacagaagttttatcagctgatacttacatacgatgtgcaatacacttcgataaattcttctgttttctgttctattaatctattttttttctttctttctttattattattatactttaagatttagggtacacgtgcacaatgtgcaggttagttacatatgtaaatatgtgccatgctggtgtgctgcacccactaacacgtcatctggcattgctagttatgacacagtaatttgatttcaggactcaccaagagggttttatcctgcagtttgagaaacaactgcagggatatgcagatttatgcaaaaggtcctgtgtctacagtttacactttggtttcaagaggttatttattaaaaacacaggacctagggccaaattaggatggctcaaatccgagttcttcttataagctgtgtgatcgtgggcaagttattaattctgtgactcagttgtttcatccattgatatggtttggctgtgtccctacacaaatctcttcttgaattgtaactcccataattcccacgtgtcgtgtcccataattcccacatgtcagagcccccacacagagtccctactagggcactgcctattggagctgtgagaagagggccactgtccttcagaccccagaatgctagattcactgacagcttcactgggtgcccagaaaagccacaaacactcaacaccagcccatgaaagcagccagaagggaggctatactctgcagagccacaggggtggagctgcccaagaccatggaaacccacctcttacatgagtgtgatcaggatgcaagacatagagtcaaaggagatcacttttgacttttaagatttgactgccctgttggatttcagacttgcatggggcctgtagcccctttgtttcggccaatttctcccatttggaacagctgtatttacacaatgcctgtacctgcactgtatctaggaagtaaataacttgtttttgattttacaggctcatagatggaagagacttggcttgtctccgatgagacaatggactgtggacttttgagttaatgctgaaatgagttaagactttgtgggactgttgggaggcatcattggctttgaaatgtaaggacatatgatttgggaggggccagtggtgggataatatggtctggctgtgtccccacccaaatctcatcttgaattgtaactcccaaaattcccatgtgtcatgagaggaacctggtagggggtgactgaattatgggggcgggtctttcctgtgttttctcatgatagtgaatgagtctcatgagatctgatggttttaaaaaggggagtttccagctgggcacggtggcttgcacctgtaatcccagcactttgggaggctgaggcgggtggatcacgaggtcaagagattgaggccatcttggccgacatggtgaaatcccatctctactaataatacaaagattagctgggtgtggtggtgcatgtctgtagtcccagcaacttgggaggctgaggcaggagaattgcttgaacttgggaggtggaggttgcagtgagccaagatagcaccactgcactccagcctggctacagagccagactccatctcaaaaaaaaaaaaaaaagatttccctgcacaagctctcttctcttgtctgccaccatgtgagacatggctttcaccttccaccatgattgtgaggcctccccaggcacgtggaactgtaagtccagtacacgtctatcttttgtaaattgcccagtcttggatatgtctttatcagcagtgtgaaaacagagtaatacatccataaaagggggataataacagtaactatctgtattagtccattctcacgttgctaatgaagacatacccaagactgggtaatttataaaggaaagaggtttaattgactcatagttccatgtggctggggaggcctcacaatcatggcagaaggtgaaggaagagcaaagggacatcctacatggtggcaggcaaggagaaagcctgtgcaggagaacacccatttataaaaccatcagatctcatgagatttattcactctcatgagaacagcatgagaaagacccctgccccatgattcagttacctcctaccaggcccctcccacaacatatgggaattataggagctacaattcaagacgagacttgggtaggaacatagccaaaccaaatctgtatctcataaactaaacttaggtaacatataactgtatatgaacctctgagaaatgaaaaggagtttagatatttatcaaaaagtaatcatataagccaacacttagattacacttactacataccagtaagtgttggctattgtaactgccaaccaaaccaaagttctcccttggttcctttaacaccggtttatccaaaacattggataaacattggtttttttctccagaagcaaccaatagatcaaggcccttggtaatgtgtgaattttatcagtctcattctgagaaatatgaggaatgagagcctaaatgtgtgagtaggggagggagggcttacttcctgcactgaatgcccacaggccaggggtatgagatttggggagagctccctcacaaacccatcacaaggggccagatctgtaaaagctcattaactgtaggtttctaacctgcacatgcatctcttaggagttttctttccagtggccaaagtttctctttgtggtctaactggaatattctatctggtttgaaatgatgatttgaggaaacaggtccagtggtctcatgctcagttactcactcactaacatgaggttcctgaagttttccagcatcacatcttggtacaggtttatctgggctttatccaatagtgccagctcttccttggtgaagacaacagccacatccttgaatgtcaccctttcctaaaacatcaaccacatgccacgtcaatcatccacacaaatgactggtcttagtctgtttgggctgccttaataaaacaccacagtctgattagattaaacaaaataaacttatttcttcctgtcctggaggttggaaagtctaagatcaagtaccaccaagataggtttcattcaggtttcttctcttggcttgcagacagctctgctctcactgtgtccttacatggcagagggagaatgagagcaagctctgttgaggctctcataaggacactaatcctattggatcagggattcccaaaggacagtattaatcaaattataaaatatggcccaggaaataggcacagataaatctatactaaggtgttgtgctgatacacaagtctagtagcatttcatgagttcatttctcatcacacaccaagatttagtattttcactttttcatggcagattaatctatttgtattatgttaaaaggaactaagaagacagggtaactaaaagcattggctcctagattcaaaaaacacaaaagagaaatgggagattattaggataattaagaacacttggatatcaactaggtattaaaaaatagtggtatcaatgtgaaatttcttgagtatgttagcagtaatgtggaaatgtaggaaaatgctcttattcttaggagatacaaactgaaatatttagggatgaattatagtaatgcctgcaatttatccccaactgggtcaatcaaataaaatatagacatgtgtgtgtatatatgtatattatacatatgtttgtgggtgattgttaacaattggtgaatctaggtgaagattacacattatgctattctttcgttttcctgataaattgaaatttctcaaaataaaaggatgcgggtaatcatctggtattaataaccatctcctcatgtgtcttttggcagcacaaatgtcttctttcgagaagtgtctgttcatatccttcacccactttttgatggggttgtttttttcttgtaaatttgtttgagttcattatagattctggatattagccctttgtcagatgagtagattgcaaacattttctcccattctgtaggttgcctgttcactctgatggtagtttcttttgctgtgcagaagctctttagtttaattagatcccatttgtcaattttggcttttgttgcatcatcactggccatcagagaaatgcaaatcaaaaccacaatgagataccatctcacaccagttagaatggcgatcattaaaaagtcaggaaacaacaggtgctggagaggatgtggagaaacagggacacttttacactgctggtgggactgtaaactagttcaaccattgtggaagtcagtgtggcgattcctcagggatctagaactagaaataccatttgacccagccatcccattactgggtatatacccaaaggattataaatcatgctgctataaatacacatgcacacgtatgtttattgcggcactattcacaatagcaaagacttggaaccaagccaaatgtccaacaacgatagactggattaagaaaatgtggcatatatacaccatggaatactatgcagccataaaaaaatgatgagttcatgtcctttgtagggacatagatgaaactggaaaccatcattctcagcaaactatcgcaaggataaaaaaccaaacaccacatgttctcactcataggtgggaattgaacaatgagaatacatggacacaggaaggggaacatcacacaccagggactgttgtggggtggggggagtggggagggatagcattatgagatatacctaatgttaaatgatgagttaatgggtgcagcacaccaacatggcacatgtatacatatgtaactaacctgcaggttgtgcacatgtaccctaaaacttaaagtataataaaaaaaaaagaagtactgaaataacctattgggtattatgctgattacctgggtgacaaaattttacaccaaacccccgcaacacataatttacccacgtaacaaacctgcacatgtatcccttgaatctaaaataaaagttggaaagaagaaaagaaaattttaaaaaattaaaaaaaccatctcctcatcaagaaaccaatttttacataaaatatttctatggctgcatatatcgcactgctcagagttaagtatttacagatatgttctctcaatagactctgcatctctaaataaagcagaggtttcaaacaaaagttgtaagcagttacaaaggacttcacaagaacatgttactaacaattgtccaattaccaaaatctgacaatgattaaaaacaaaatctaggggagtcagcacggttgtcctaatagcaccactctctcagtaacactactgtatgccttcttctgtgggaggcaacaaaattgaattggagataatcattcaggaaatacagatacactgaagcttacttggggtgttccaatgtaggaagaaggagttaggaatagaggttcacacagcctactcctcattctcccttctctgcctcagctatagagcctgggaaaacaaaacactcatttctccaccacccttgtagctggatggatcccttgtgggaatcctaggcagcgattgtcataggatgcagatacaaggacagccccaaaatattaagaaaccaaatttataaatgaataaacacatgcaaaaatctttaaatcttttcctctatgaagtattcttgtataaccatctatgaagtatgaatctattcaagcatctggtgcttccacttacaagaaatactgtggatagagtaacacactgaaagacaccaaaaggaagcaaacaaatgcattccaaatgtaggaaagaacacaggacaccaaacttggtttctgcaacaagtcaatagcaggagagaataaagtagaggggcagatttctctagattaaaagacattatgagatacaacaactaactgtatgatagtatagaccttgttaagatcccatttgaacaaaccaactgttaaaaaattttttgagataatcagggaaatttgattattgtctgggtattagataataccaaataattattgattatttcattagtccatttttaaggaaatatatactgaaatacacagagagtgtggtaagttagactgctgtttagaaatatcctcttccatgctctccaatcccactaaaggaccagagtgtgtttccttacccctttagttttgacttggcagtgtaacttattctggctaccaaaatgaagcagaagtgataatgtgccagttctaaacctgggccttgacagatctcacatgtccacttgctctcttgtccctctgtcttcactatgaggacacaaccaagctaaccaaaacgagcagagtgctaccaaatatccatggcattggctttaggtccaggccataaccattgaggacactgttacaggaggctggaaaaatggtgacctgggtgatgcagtggtgaacatttggtgaactgttgctgtaatttagaagatagaaaatgtacctaatgaatcttggacttgggcaagatggtttccaggcagcaggataaaagtgtgaactcattcattttagttgcatatataataaggtactatacaaaagtgatatgctcagagaaaaaccaataccatgtgaaataccatgcctctttcaaatactttgggaaagaaaaaaactgaaaaagagattaagcaattctctttggcaaaaagttaattgttgaaactgcatgatgggtactgcaaatggaggatcataataccatttgctctttttgtgtattttcataattaatttttttcatgattaaaagaaaatccttcctccacactgtgatggtctttctaatgtgtcaacttggctaagctacagtcctcagttattgaatcaaacactaatctaggtattgctatgaagataatttgtagatgtgattaaagtccataatcagttgactttaagggagattattctaactaatctgagtatgtctgattcaataaactgaaaggtcttatgagcagagctgaggcttccctgggagggggagaaattccacccacagacagtagcttcagtctgtgtccaagagttccagcccacccttcctgaggggctgccctgtggattctggacttgcctagttagcccccataatcatataagtcaattccttatgataaatctcttaatatatatctcttactggttctgccttgctgactgaactctgaccaatacatacccattcaaatcttgctacttattgaatgaggccagtcacatttagagtatggtcacgtatatgctgcccatgcactcggatgctgcggcaacaccaaatttctgtaagtttctgaacttactcttgattctttttccctcatcgggcagtgataagcagttcatggactggtactgatacatgaactacacttagagtagcaccaaagtagacatcttgaaatctgtgagtttgtttcttcacttctataaagggagtcaaaccacctgcctcacaaagtcattatgagcagataaagtacctaatacatagtagtcactcaaaaaatgctgacctcctttcagaaaacagaagtgtctggttcctcagaatgaacagcatatttaaagagaaagaaacccttaacttacctggaacttaatcataccgtcttccttttggaaagggcaggattctggaaaagcagaactgcaaagaagaaataatccatgagatcatgggttcaacaagttgtgaatgaacattggttccttccttatctgtacaagtttctcacaatttctcctctcactggatatcatctcttctcgctctgaacagactgaactcccacctcctcaagacttccctagatttgtccccagtccctcaatctcagaccactgtgtaactcctatctctctcctgaagcttttgggtcaaaacctgcacattcttttccttttctgagacttgtgaatgaactgacataatctacatctcaattatgctggaaaagaggctacagaattgctgaataagggagcaatctcagggctgggcacagtggctcacacctgtaatcccagcactttgggaacccgagacgggtggatcacttgaggccaggagttcgagaccagcctggacaacatggtgaaaccctgtctctactaaaaatacaaaattagctgggtgtggtggcggatgcctgtaatcccagctactcaggaggctgaggcaggacaatcacttgggaggcagaggctgcagtgagctgtgattgcaccactgcactccagcctgggcaacagagacagactttgtctcaaaagagaaaaaaaaaaaaaacagaggaaaaaaaaaagagagagcaatctcaggatgacagggaccttctgctatttccactttcgcatgcaagacttgatcttgtatggccaagcctgtggtctaaagaacatgccgttagccaaaatatacaaattaaatcccaatttttattattatgttaatcaataatacaaatttttaaacatctacaccttgactcttggcttcctaaactatctctccagcacccattctatcccctgcttttgcaaatattgatgacacacctatgacatataagacacattctctgttctggaaatgctcatggtatactgaactacacatgttctcagactgcaggtagaccaaagtaggtagacagaggccttctaagcttgccacttcatatacactaaagccccttcctgttctgcttatatcagtggattcccttgccagttagcttccagttgggttcagccaatggggaaagccagcaagagatccagggaagggacaagagtgaagtcagaatatttattcccccaggtttttccctagaggttgctgtggaatggctatattccatatccattgaccaaaggtcatggcctccatcaggcagctgtcatcccataaatctttcttcaggttttagcaactgcctcctcccttagcccttcagtcctaaagtcagtaagttaccctgctatcactagctctgaaatattgcagtatcctttgttgattaccacagcctgcctacaactttatagattgtccctttattaagctcttctcaaattacccaatttgagtgttctgtttattttttattgggattccatctgataaaccctgtaaacacaattgcctctggcctttgtggagaaacttattgtataaaattgccactttaagcactgtggaaacaccgaagattaaaaaacaaaagcccaaagccatgtttctgccttctcagatagtgcttctcacactatctgtgataaaggactagtttttaaattattattactgttactttcagtctgtcacagactgatattctggtaagatacagtaacaagaaattaccagaaaaaggaaatttagaaggtatgcaaattaaagcccaattgttattattatgttaatcaataagacaaaattttcaacatctacactcaagttctcaaattatctggtcacagaccaatatcatttattggcactggtctgtgggctaccctttgaattgcagctcacagggttatagaatcaggttaatagaatgtgaaatgtctttttggtaaatccttggactctttttctctcctttcctacctttaagagacatcattaatcacttcttattttgggctccaacaaaggccaaaataaggagggttcaactcattagtacagcatgaattacatcgttttacaatagttaaaacctaccaagaaaacactcctcctttcccctgtcaaaaaactacaaatcctaaaaaaaaaaaaaaataaccaagctgtagtcttttatccactgtacttggtaaggatcttatcatttaacaagcactcaatcaatgtttctcaatattaacaaatgcacaaatagaattggcttggatattatacattagatgcacgtgcaaagacataaactcaccctctacttccagtacctgttctcactgaagagccaataatgggacaggtttattttgaagcacacatccacacacatgcactcacacatatatggttgggggtttggtttcctgaatttctggcttcagacactacctgcctgtatcaagtcagggccgtggcacgaaccagacggcacattgaaatttgaggagagtttaataaacagacggcttacaatggtgttggctcggggtaaggaaatcacaatggataaggctctatcctggggagtgacagggaggtgccattataatacctgggccttaagaggtaaggggagggagcagtccctggagcctggaactaagaggactgtgtggccagggccacccaaactatgacctgttgtttagaagggcagctaatctgtgacaatcctgcagagagagaactgggggacaagatactccaactcacacttcttcctctctccaaactttcctgttgagacttcccattggccaaagacaagcaaggccagaaggcaatggcggcctttcagggcagacagcagggtggaaaaggtggggagccaaaggcatgggacacatggcacctcaagactcttgttttttccctatctgccaaagtccacacagctctcgcacacaaatgcctttctcatccctcaccctgacaactactctgatctgaggaatgcatcaggaatgagaccagatgcccatatcaacttcttcagggaatgaagacctagaggaaaagtgcagctgaatctggaactgcaattgcccagaaacacgatcagaaatgtaataaatgctgctattacacctaaaataattaacactaaatctctaactttatcaaatatacagagagtgttcaaacttcaaatttgttgagtgtaatttaacaacttatatttgctaatgtgctttataatactcaaagtccctactccctggctcacagcatgtgaggtgagaatggagtta[131 bp omitted]gcctcagcctcccgagtagctgggactacaggcgcctgccaccgtgccc[180 bp omitted]taaactctggagttattacagtattacagtctgagttgtttctttattgccaaaagccagaacctctgccttgaagtcataaatgccccaatggagtcagagctgccaaaatccagagttcagacccaagacaactccccatccaagaacctaggggtgctgagccagaatcgcccccaccaaactgagcgagaacagccgaagccatcctctatatccagagactagctgcttaagcaaatccctcatcccattcagggacgcacagtccagccattactccaaaaccctgagccagcgcccctctgccctcatccagagatgcacatcccaagactgaccctaagcttcgacccgaggaggcacagcgcaagtcgctgtcacgaaacgtgaagatgcactgttttgtcaaacccagggctgctccccaaaccgagcccacgctcgagcccacgctcttcccatcctatcccgggtaggtcgggccgctgaacttccctagtctaccccacctacgaggccttatcattggttaccagtcccctcttccactcctcctacttcagtccacagggacgggtcacagctgcacatcctacactcctactcctggctacgcctccaagaggggcgcggtacagacgggactcaccccagcgtcccaaacaatgtcgcccgcagcgtgcgtccagtaccatggcgcatgcgcaaggaggcctatggcctacaatccccagaaagccccgcgcgcagcagtggccattcgcaaggctaccctggtgaaggtggcctttgacttccgtgcatttggaagtcctttgacttccgtgcattcgtctaaaataacgacaatcataataacgataaaataatgaaatgttaaataaatcactatcaacgatgaaaagaagtttcaatattttactacttggaaatgggcactttaccgttttagtgaagacttttataagttcttattttataggcatgtcttttaacgttaaaaccacgaaacttttcaattaacactcacttaaataattccctccccgccccccaccatgttttatttctgttgatgaaaactctggataatctacacttgcgatataacatagccctgtaatttatttcctagtctcagaagaagcagaaggaattaacaactattgtctgaatccttaacaggggaattgcaggagtactgagagtgtcctaaaagagacacattacaacataacaagaaaacgcgggaagttttcagattctttttgaaaatttgcccttgttgagacttaggctttattttacttcatgttattgcatttaagatttaagatttctattaaagaaaaatttgggtaccctaaatggggtaagaaaattgaataggaattccattagaggcccacagttttagcctggaggaaagccctgataacgtgtgagaacaatctgtctcctaggaaaggtcacctggtcctgctggcagagtctctgtttggaatatctggctggcattcccttttccacgcaccctcaagctgtaggggtggtgaggcggttccagtcctagactagatagagaagtgaagacccccacctctacgcaatgggcaggaaatggttgaataatatccaactatagcttgacatcgcagcttagggcacataaagggacagtgcaattgttttggcttatctctgtcttttgatgtttacatgtttgatgttcttatatattgctctaagttgaaggattacttgatttaatttgacatacttgaattttaaaaaacgagttcaggaacatttttatttttgacctaatacaaggttaatttttgtgacatctgtgtctgttggaaaacaatgtgtcttctctatcagatggatatgcatacatttatattttccccagacttgctaactgtgctatttaaatttcctacatgcttatttgtgcttacttagattttttcattatgcatctgtcaacgattgaaaagtgcatgtcaaaaaggttcccagtctgggcgtggtggctcaagcctgtaatctcagtactttgggaggccgaggtgggcagatcacgcggtgaggagttcaagaccagcctggccaaggtggtgaaaccccatcgctactaaaaatacaaaacttagccaggcatggtggcaagcacgtgtagtcccagctacttgggaggctgaggcaagagaatcacttgaacccaggaggtggaggttgcaatgagccgagatcatgccactgcactccagcctgggcgacagagcaagactctgtcaccaaaaaaaaagaaaaaagaaaaaagtgaaagaaaaaaaagcctataatggtaaatttgtcattttcctctctatagcatttgctttatttatttatttatttatttatttatttatttcctttattttttttttgagactgagtctcgctctgttgcccaggctggagtgcagtggcgccatctcaactcactgcaagctctgcctcccaggttcacaccattctcctgcttcagcctcccgagtagctgggactacaggtgcccgccaccaggcccagctaatttttttgtatttttagtagagacagggttt[142 bp omitted]ggctttactttttaaaagttgtgttgttaggtatggaagtgttgtattccttatctgaaatacttgggaccagaagtgtttcagatattttatttttttcagattttgcaatatttgcatatacgtaatgagatatcttgaggatgagacccaagtctaaatgcaaaattcatttgtgttccatataaaccttatacatgtagcctgaaattaattttatagaattattttgaataattttgttcacaaggtttgtatacaatgtttgtgtgcattgaaccatcagaagcaaagattgccttcgtcagatgaccaaagaaaaatcaatgaaaagaacagaaagaaagcaaatacttcaggtgtggaattttccacttgtggtgtcatgttcacattccaaaagttttagattgtgaaacattttggattttaaaatttagtgatgctgaccctgtgtaagtttcataatgttcatatcttcttgatgggccaaaaatttcgttaacaattttaagtattttgtattttcaccttgagtttacttttcagtgaagactgtacctgctttcttttcattagatttcatctagtatttattctttcattttgtcttaaaattagtatatttctttaccttattatttatatactctttattattatagttatttttaaatgttacttttacctaatctaagagcttggctttagtctgaaaatccacacttaaatgggtgtgttaagaacaaaagagaaagctcttgtataattgatctaggagctgctcatacttcccaactgtagaacagtgaatctggcctgtaatcctagttgctcaagcagctgaggtgggaggatggcttgagcctggaaggttcagggtgtagtgagctatgatggtgctactgtactccagcttgggtgacagcatgagatcttatgtctgaaaaaatagaacagtgaccctcaaacaggaatgaaatagcctccctaagacttttttgaattgtgtgagtgatctttgcttgctccagtgactggggtatgtgtttagtatgcagaggtaaggaatgctaaacatattgcacttgtaaattaattctctcaacaaagaagtcatccattcaaatacccaacagtaaccccttgaaaatcactgctctaaaggaaagaaaatgaacaacaataacctcaatcaaataaaaggagggaaagaaacaatcaaatcagtaaagagaaagtcaaactgctgctgtttgctgatgatatgatcatatacctagaaaaccctaaagactccttcaaaaagcttctagaactcataaatgaattcagcaaagtttcaggatacaaaattaatgtacacaaatcatagctctgttgtacaccaaaagcaaccaagctaagaatgaaatcaagaactcaaccccttttacaacagctgcaacaaaaaatacataggaatatttctaaccaaggaggtgaaagacctctctacaaggaaaactacaaaacactgttgaaagaaaccatagatgacacaaacaaatggaaacacatcccatgtttatgaatgggtaaatcaatattgtaaaaatgaccatactgccaaaagctgtttacaaattcaatgcaagttccatcaaaataccaccatcattctttccagaactagaaaagacaattctaaaattcatatggaaccaaagaagagcccgcagagccaaagcaagactaagtaaaaagaacaagtctggaggcatcacattacctgacttcaaactatactataaggttgtagccacccaaacagcatggtactggtataaaaataggtacaaagaccaatggaacagaatagagaacccagaaataaatccaaatacttacagccaactgatatttgaaa[156 bp omitted]cactaaaaatacaaaaaattagcctggcgctgtggcgggggcctgtagtcccggctactcaggaggctgaggcaggagaatggtgtgaacctgggaggcggagcctgcagtgagccgagatcgcaccactgccctccagcctgggtgacccagcgagactctgtctcaaaaaaaaaaaacaaaaaaaacaaaacaacaacaacaacaacaaaaaccgtattcaacaaatggtgctgggataattggcaagccacatgtagaagaatgtgactggatcctcatctctcaccttatgcaaaagtcaactcaagatggatcaaaaacttaaaacttgaaaccataaaaattccagaaaataacatcagaaaaacccttcaaaacattagcttaggcaaagacttgatgaccaagaacccaaaagcaaattcaacagaaaaaatgataaataggtgggacttaatttaactaaaaattttctgcacagcaaaagaaacactgagcagaataaacagacaacccacaaaggggagaaaatcttcacaatccatacatctgaaaaaggatgaatattcagaatcttcaaggaactcaaacaaattagcaagaaaaatacaaagaatcccatcaaaaaatgggctaaggacatgaatagacaatccttaaaagaagatatacaaatagccaacaaacatatgaaaaaatgctcaacatcacgaatgatcagggaagtgcaaatcagaaacacaatgcaataccaccttacagctgcaagaatggccataataaaagatttaaaaaataatagatgttggtggggctgtggtgaaaagggaacacttttacactgctggtgggaatgtaaactagtgcaaccactatggaaaacagtgtggcaattccttaaagaactaaaagtagaactaccatttgattcaacaattccactactgggtatctacccagaggaaaagaagtcattatatgaaaaagatagttgcacacacgtttatagcaacataataagatgttttataaatataagtgatgaaatccctctattgaaagtttattagagttcatcagcattgatatcatctctcaaaattaaaaaaaaagttttcttttgttgtttgttttggtttttgtttgtttgttttgatgcatggtcttgctctattgcatatatatatatatgtatatatgaatgctattccacaataaagaggaacaaattaatgccattcatagcaacttggatggaattggagaccattattcttagtgaaataactcaggaatagaaaaccaaatattgtttgttctcactcataagtgggagttaagctatgaggatgcaaaggcataagaatgatacaatggacttcagggatggaggggagggaaggatgggagaggggtgaaggaagaaagactacaaattgggtacagtgtatactgctcaggtgatgggtgcaccaaaatctcacacatcaccgctaaagaatttattcgtgtaaccaaatgcaacctgtttctcaaaatcctattaaaataaaaataaatcaaaaaattaaaagccattgcaaataaagacaaaatcagatgttttataaatataagtgataaaatttctctattaaaagtttatagagttcatcagtgttgatattatctttccaaattaaaaaatgttttgtttgttgtttgttttggtttttgtttgtttgtattgatgcatggtcttgctctgttgcttactgcagcctcaacttcctaggcatgagtaatcctcccacctcagtgtcccaagtaagtggaactacaggtgtgcaccatcatgcctaactgatttttaaaaattttcttatagagatagagtctcactgtgttgcctaggctggtctgaaacatgtgtgttcaaacaatcctcccagcttggacagaaaaaatgttggaattacaggcacaagccatcatgtctggacagaatttttttttttttttttttttttgag[135 bp omitted]cacgcccggctaatttttttgtatttttagtagagacgggttttcacc[137 bp omitted]ggatgaaagacataacaaggcactgaaatgaaaaatgacgaaaaggcatcaactatgaccaccttgttatcacaaaaatgaaaaccaacatcatttttacatatcaagttcacaaagattaaacataaatcccttgatcctcaatagtgtgaaaaaatggacacgtttacattttaggctgacagaaaaaaacaaaaacagtttttcctccgctctcacatcacaacaatcaacacagaagatttctgtgacgatatgtctagggatttctctcggtcagtcaagcacacaatccattctgctgtggagagcagctgggtgtcttctaattcatttatgacactatctaactggacatagcattagattccacagggctcagttccgcaagactggcctcccactctaataacaatggcaagccatacgttgttttacctatgctttcatcaactagctataaatcaggtttccaccgctccctattttagttgcattactttcctcgaacagctcacagcacgcagggaaacactgacatttacaactttaccatagcggatattgcaaaaaatccagaaaaaaagattcatgggtcctggcagggggaaggggcgcactactttccaggaagttttacccagaagctctctaaacccagtccttttgagtttctatgaaggcttcactctataggcatgataggttaagccatacgctattggtgatcaactcaaccttcaggcactcaaccctcctggaaaatggggttcaggcactgccattctcagtctgaataatagaatttacataaacagaattttacaacagattagcataactgaaaactgaattagatgattgaattatctggagccacaccttgatattcctaatccaatcaccctcatccaatgaatgctccacccaactggccccgaagtatctagatggttccagagcagaagaatgtttatacaacggatatctcccctttttctcaaaagtcgtttcgcttacacgggtaattcttaaactgccatgcatcagagtcagggggagggcttgttacaacacagatctgtggatctccggggtttgagggttgcaaggatgctgctggtgtcaaaaccacaatgtgagaaccacagaaccactagatggttttcagtgtttcagtgcatttaattcataatatatttcaccaagaaaacttgtaagttcttagattgtcccaaatgtggcgcatgaaatcaaatcaggagaacagtttcctacgcggtgtaacctgggaaagttgggggtgactgatggaaaggaggagtgaagctccgccctttccgctgccaggctgcgcccgcccgaggctatttaaacccaccctggcgggcctgtactcagatcttcacagagcggagcagcggccggagcgttttgcgggctctgcgtggacttggagcttacagcgtcttgcgacttggaagcagattcagaggacaggacagaacacttgggtaagtgaatctctgtctgtctgtctgtctgtctgtctcattggttggtttatttccattttcttaaggagcacatacctcacatcacacacacacacacacacacacacacacacacacacacacacactccttctttctgcgggttagaaaactggtaggcttctctgggagctacaggtttcctaatcatgtctgcacctaagaacagtagggtcttgtctggctcttcttatgaaccgtcccccagcccggactccccaagatccatgctagcctcacccagcttctccctctcccctctcagaaactcagacttaagaggaagctcctcaccagggatccggagctaccgttcaccctcccctagggcttcaccacactcacctctgtcatcaccagaatcccacaagctcccatttccctttcctcaaccgtgatgggcaatcaatgaagccattgggttctcccgcgtcctcctctggggattctttagaatcaccacgttcatcaataatataacacatgttcttactgccatcacccagcagctcacccccggctctctgggaatctcctgtgcctcccagccactctccgaacaaccccggatttcagctggagtcagccccccacacccaggaatcacctacaaactcacgagcctcacggtgctcctcccctgtgtctttcatctcttcacccccaggcctcagggactctcctgtgcctaccagttactctccagccatccccaggtttctgcgggagtcagcctcatgcacccaggagtcccccagagactcacacgtctcgggagattatgagcggtcccccagccctgactcctcaagattcatgcctgcctcacccagcttctccctctcccctcccagaaactcagacccaaggggcagctcctcgccagggatgtggaagtactctacatcatcccgcagggcttcaccactctcacatccatcatcaacagaatttcacaactttacatttccctttcctgaccaagcaggacaatcactgatgtcattgtgctctcccggacaatcactgatgtcattgtgctctcccgtgtcctcctctggagattcttcacagtcacctcattcatcaataatataccatatgttcttactgccatcatccagcagctcacccccagccatcaatgactctcctgtctgtcccagctactctccaactacgcccagatttcagcgggagtcggtctcccactccccagaaacacctacaaactcacagacctcagtgagatcctcgccagtctctctcatgtcttcacccccagcccttacggaccctcctgtctgtcccagctactctccaaccacgcccacatttcagcgggggtcattttcaggaacccagggatcactaccaagctcaccactttcactgagttactccccagtctctagcaggtctttatccccaagcctcagggactctcctgtccgtcccagctactctccaaccacgcccagattgcagctggagtcagttccaggcaccctggaatcaccaccaaactcaccaatttcactcaattactccccagtctctctcatgtcttcaccagccctcagggactctcctctgtgtcccagctactctcataccacgcccacatttcagcaggagtcacttccaggcacccagaaatcaccaccaaactcaccaatttcactcacttactctccagtctctctcatgtcttcaccagccctcagggactctcctgtctgtcccggctactctccaaccacgcccagattgcagctggagtcagttccaggcaccccggaatcaccaccaaactcaccagtttcactgagttactccccggtctctctcatgtcttcacccccagccctcagggactctcctgtgtgtcccagctactctccaaccacgcccagatttcagcgggagtcagttgcaggcacccaggaatcacctacaaactcaccagtttcactgagttactccccagtctctctcaagtcttcaccgccagcctcctgggactctcctgtctgtcccacctactctcccgccacgcccagatttcagcgggagtcagcctcctacactcaggaatcacctacagactcacagacctcactgagatcctccctggtctctctcagctctttgccctcagcccacagggactgttgtgtctctttcagctactctcaaaacttctctagattcccgctggagtcagttccaggcacccaggacacaccagcaaactcaccaatttcactcagttactccccagtctcgctcatgttttcacccccagccctcagggactgttctgtctctctcagttactctccaaccatctccagatttcagctggagtcagcttcccacacccaggaatcacctacaaactcacggaccttactgccaccctcccccatttctttcacctcttcacccccagccttcagggactctcctgtgtctcccagcttctctctggccttccccagatttctgccgcggtcagccccaggcacccaggagaaccctagacactcacaggcctcacgagactatttccctgtgacctgtatctatacaggggtggctcccacgtatccctcagtgaccccaaacccatctccacttacactcagacactcccagggcctgacagctactccccgttattgtccttcagttggaagccctggccaatctactagccaacatgacgcagttacctggccatttctccacattcctggtgagcgccccacacccagccgcagaaaagcccctcctgcattccgtcctcacacacaggcctgtccatctacttgctactgtcacactcttgccagcagaagaggcccctctaatggccgatatcaccgcccaggctatcctcaccccacagctgtgcagcgggaccctcctgctggcccacgtggctgccagagcccatgctgacaccaacctccagcatgtcggcatccctgcgggcgacactaccggtgacatggccagcatgaccctcctccctggcagtgacactgttgatgtgagccccagtttcagatctgtcatttgtaaataggaccattttcccttttctctctcgcttccattcacagggcttttcattctctctgtttctgcctccgtttcagatatttactcacctttttctctttcactatgtctgccgtggtctcgacgagagtgcgccacataagattcccccattaaaagtcatgaattgagtggcttttagtatacttgtggttgtgcacgttcaattttaattcgcaatccatttgagaacattttatcacccccgaccagagaaaaaccctctaaacgtcagtcactcctcattctgtctcaaactctctccctgaccctcaaccctaggtaacaactacatagagcgctcaaccctatctccttagatttccatattgtggacatttcctatcaacagaattataacatatgtgaacttttatgaccgactttacacttagcacaatattttcaaggttcatccacattgtagcattacccacagtgggaaaccattttttttttttttggttttagtaacaccaggtgttttctccttccttctttccttccttccttccttccttccttccttccttccttcctcccttcctcctatttctctcttactccttctgccctctctctttcacatgccttcggtgcatcctactttctgtgtgtttttgggaaatcctcgacagttgcaggaaaattgtgttattgttattatttaccggtatctctctttcatggttctccatcagttgtaaacatctactggtttctcccaagtcactaagtatattttaatgaggtacacctgtttttctttatacagctatttctggagtgtagggtcacatactgataaacccaatgtgacccaaaaacgcatctaataccccaataaacccatcataaagttgaaaaatcataaatcaaaccatcataagtcacggtttgtccgtggatatgggcttcatcaattccattgtattcaataatgctctgcacgattaacaatggcagactgatagggagtggatactgatagcattttaaaaatcagttattagagggatactttaacctgactgaataactgatctaattgtattagtacggtgaataattatgtgaaatgttttgagacagtgtagtacatttgtgaatgaaattttgtggcttttttccacttagtaggaacctttgtgtgtagaaaactgagaagattgctttctgctgtagagtctggcattcgttgtagattaaagcttatttttctgcgaataagccatagtcaataaaatactattctttaaaaaaataaaaaacactggtgatgtgaagtcattatcctcagcaaactaatccatgaacagaaaaccaaaaccacattttcacctataatgggagctgaaaaatgagaacacatggacacaggaaggggaacaacacacactggggcctttcgggaagcagagcgttaagaaaaacagctaatgcatgctgggcttaatccctaggtgatgggtcgacaggtgcagcaaaccaccatggcacacgtttacctttgtaacaaatctgcacatcctgcacatataccccagaacttagaaacaaaacgaaacaaatcaaaaggaaaaaacaataacaaaacgctagtggcaaaataaagtttcaaactgagaaagcgatagagcaatttttggttgaaatcatggttctcaacccaggtgccataaggtcaggataaagaatttgattacgtattgtaaataagacatacagcaaatgactagaaaaattattctcaacatatatgtgccttctaattcaatgatgacgctatctaccgggacatagcattagattccaaagggctcagtcccgcaagactggcctccctctctaataacaatgggaagccctatgttgttttacctgtgcttcttagcaactggctataaatcaggtttccaccactccctgttgtaattgcattaatttgctggaagagctcacagcacgcagggaaatacttccatttaccattttatgatagcggatattgcaaaaaatttagaaaacagattatgggcctggcatgtggggaggggcgcactgccttccaggaagtgttatccacaagctctctaaacccagtccttttgggtttttacggagacctcattctataggcatgatgggttaaaccataggcgattggtgatcagctcaacctgaggctctcaaccctccctggaaattggggttgaggcattgccattctcagtctgagtagaagaatttacacaaacggaattttaagacagattagcaaaactgaaaactgaattagatgattgaattatctggagccacatcttgatattcctaacccgagcaccctcatccaacgaatgctccacccaactggctcctaagtctccacgtggttccagagcaaaagaatgttcctacaacgcatatctcccctttttcttcaaagtcttttcgcttacacgggtaattcttaaactgccatgcatcagggtcagggggagggcttgttacaacacagatctgtggatctccggggtttgagggttgcaaggatgctgctggtgtcaaaaccacaatgtgagaaccacagaaccactagatggttttcagtgtttcagtgcatttaattcataatatatttggccaaaaaaactcgtaagttcttagattgtcccaaatgtggcgcatgaaatcaaatcaggagaacagtttcctactcggtgtaacctgggaaagttgggggtgactgatggaaaggaggagtgaagctccgccctttccgctgccaggctgcgcccgcccgaggctatttaaactcaccctggcgggcctgtactcagatcttcacagagcggagcagcggccggagcgttttgcgggctctgcgtggacttggagcttacagcgtcttgcgacttggaagcggattcagaggacaggacagaacacttgggtaagtgaatctctgtctgtctgtctcattggttggtttatttccattttcttaaggaacccatacctcacaccacacacaaacacacacacacacacacacacaaacacacacccactccttctttctgcaagttagaaaattggtaggcgtccctgggagctacaggtttcctaatcatgtgtgcacttaagaacagtagggtcttgtctggctcttcttatgaaccgtcccccagcccagactccccaagatccatgctagcctcacccagcttctccctctcccctctcagaaactcagacttaagaggaagcttctcaccagggatccggggctaccattcaccatcccctagggcttcaccacactcacctctgtcatcaccagaatcccacaagctcccatttccctttcctcaccatgatgggcaatcaatgaagccattgggctctcccgtgtcctcctctgggcattctttagaatcaccacgttcatcaataatataccacatgttcttactgccgtcacccagcagctcacccccagctctcggggactcttctgtgtctcccagctcctccccagacaaaccagatttctgacccagtcagcctgccgcacccacgaagccgagagacacttacagacctcactggcatcctcccctatgtctcccatctcatcacccccagccccatgctcttaacactgaactatctatgtctcatatatacagcagcaaaacaaaaccagagaaagtggaaagcagataatacagaaaaaacagaggtgaatgaaatgaaaaatataattttctgggaatatatagagaacgcaaatatatttaacaagcagtataaatgctaaataaaactacaacctcagaagaaaccttaggttaatccccaaataggaaatctattctgaatgctctaagagggaaataacaccaaccttcaatgaggtgattattacaataaacttttccagagagcagaacgcgctaggagcttcttattatattactaccacaaatcctagtataattttgataaccaaattataccataatagaacaacaacaactacaacaacaacaaataaagccagaaaactaaaggaaaatgtttcaacgaataggactgcaaaattgtatgaaaagcagcaaacaaaatccagcaatatattgaaatttttacagtacaacagtaatgcatggaaattaatcattactacatttagcaatataaatcatcatattaagaaatattactttctaaaacatatcaccatgaaaataaatgtcaatcaacagtttgaaagtaattttcttgttaatatatataacaggaaaaaagatcaaaacctagaaaaaatacacaaaaagagttcatagataagatgaatacctaaacagaaagaaacaaggagtaaatagcaagggaaatacaaaggaataagcttataagaggatgaagagtcagggagatgtggctcacacccgtgatcccatcactttggtaggccaaggcaggagaatcacttgagcccaggattttgagacaagcctgggcaacatagtgagacctcgactccacaaaaaaaataaaagaaaattatcaggtgcagtggtgcacacctgtagttgcagctactcaagaggctgaggatctcttgaggctctgatccgaccatagcactaaagcctgggtgacaggctgagatcctttctcaaaaaaaaaaaaaaagaaaaaaaaaaagaggatggccaatatctcctacctggaaaaattcacataacgtaatgccataattgttcacctgatggaaaaaaataaaaggattaataagagccaggtttttttgtttgtttttcttttcacatggagtcttgctctttcacccaggctggagtgcagtggcttccgcctcagcctcctgagtagctgggactacaggcgcccaccaccacacccggctaatttttctactatcagtagagacggggcttcacaatgttggccaggatggtctcgatctcttgatctcgtgattcacccgcctcagcctcccaaagtgctgggattacaggtgtgagccattgcgcccggcctaaaatttttttttaattaaaaattaaataactaaaaaatgggtgaaagacatgacaaggcagtgaaaagaaaaatgacaaaaacacatcaactatgaccaccttgactgttagcaataaaatgaaaaccaacatcctttttatatatcaagttgacaaagattaaacatttttattataaatcatgtgatcctaaatagtgtgagaaaatagacccttttacattttaggctcagcgaaaaaaacaaaaactgtttttcctctgctctcacatcacaacaatcaacacagaagattcctgtgacaacatgtctggggatttctctcggtcagtcaagcacaccatccattctgctgtggacgccagctgggtgtcttctaattcaatgatgacactatctacctggccatagcattagattccacagggctcagttctgcaagactcgcctcccactgtaataacaatggcaagtcctatgttgttttacctgtgcttctgaccaactgggtataaatcaggtttccaccactccctgtttcagttgaattaatttgctagaacagctcacaccacacagggaaacacttacatttaccattttattatagaggatgttgcaaaaaattcagaaaaaaagattcatggggcctggcatggggggaggggtgcactaccttccaggaagttttatccagaagccctataaacccagtccttttttgtttttatggaggcttcattacataggcatgatgggttaaaccatcggctattggtgatcaactcaacctcaggctctcaaccctccctggaaattggggttgaggcattgccattcttggtctgagtaatagaatttacataaacggaattttaaaacagattagcataactgaaaacttaattagatggtctaattatctggagccacaccttgatattcctaacctcaccaccctcatcctatgaatgctccacccacctggccccaaagtctctacatggttccagagcagaagaatgtttatacaatgcatatctccactttttcttaaaagtctttttgcttacatgggtaattcttaaactgccatacatcagggtcagggggaaggcttgagagaacctagatttgtggatctccggggcttgagggttgcaaggatgctgctggtctcaaaaccacaacgtgagaaccacagcactagatagttttcaatgcatttaattaataatatatttggccaacaaaatttctaatttcttagattgtcccaaatgcgtcacatgacatcaaatcaggagagcagtttcctaggagatggagcctggaaaagttgggggagacacatgaaaggaggagtgaagctccgccctttctgctgccaggctgcacctgaggctatttaaacccaccctggcgggcctgtgcccagatcttcccagagcagagcagtggctgcagtgtcactgcaatggccaccactgccagaatggtgttacatcagtctattcaaaaggctcattttgttaatgattggcaagccaattccacccaaatgtggaattctcaacaaggcattgatcaaaaattggctaatcaaattaattatttaagacagtctgttacttggcttggagattgggtagtgagtctcaaacatcgaatgcaaatgcagtgtgattggaacacttcagatttctgtatcaccccatgttcctataaagagactgatcattcatggtaaatggtcaaaggacaccttctgggtagggaagataatttatcatttaatttaagataaattaaagaaacaaatttttgaagcttctcaagctcacttatccattgtgcctggagctgaggtgttagatcaggtggcagaaaatctttatggattaaaccccatgacttggattaagtctattgggggctcctctgcagtgaattttggaaatatgtttctctgtttaatcagcttgtctttagtgtgtggaaccagtcaaagaatcctgagtcaaaattgagagaacgaacaagccttcatcaccttggcacatttatataaaaaaaaaaaaaaatgggagagatgttgcgggaagtcagggactccgaacgttgggacaggctgaagccatggcagaagaacataaattgtgaatatttcatggacgtttatcatttccccaatcaatactcctgttttttcctatgcctgtctttaatctcttaatcctgtcatcttcgtaaactgaggatgaatgtcgcctctggaccctgtgatgattgcattatctgcacaaattgtttaaaaaatatgaaatctgggcaccttgaaaaaagaacaggataacagtgatgttcagggaataagggagataaccattagatctggctgcctgagagccaggcagaacacagccatatttctcttctttcaaaagcaaataggagaaatattgctgaattctttttctcagcaaggaacagccctgagaaagggaatgcgttcctaggggtaggcctctgaaattgcagctctggggacgtctgtcttttatggttgcagataagggatgaaataagccctggtctcccgttgcactcccaggccaattaggatgaggaaattcccgcctaataaattttggtcagaccggttgtctgctctcaaaccatgtctcctgataaatgttatcaatgacaatgcatgcccaaaacttcattagcaattttaattttgccccagtcctgtgatctcaccctgcctccatttgtgttgtgatattttattaccttgtgaagtatgtgatctctgcgacccacaccctattcgtacactacctccacttttgaaaatcactaataaaaacttgctggttttgcggcttggaggtgcatcacggaacctgccaacatgtgatgtctcccccagacacccagctttaaaaatttctctctttgtactctttccctttatttctcagaccggccaacacttagggaaaatagaaaaggactcttgttgaatcatcatgggtgggttcccccagtgcataggtatacataggccatggtgatttgctgtatgcatcaacccatcatctacatgtgccatggtgatttgctgcacacatcaacccatcatctacattaggtatttctcctaatgctatccctccccttgccctccacccaccaacaggccccggtgtgtgatgttcccttcccagtgcccatatgttctcattgttcaactcccacttatgagtgagaatatgcagtgtttggttttctgttcctgtgttagtttcctgagattgatggtttccagcttcatccatgtccctgcaaaggacatgaactcattcttttttatggctgcatagtattccatggtgtatatgtgccatattttctttatccagtctatgattgatgggcatctgggttggttccaagtctttgctattatgaatagtgctgcaataaacatacacgtgcattcatctttatagtagaatgatttataatcctttgggtatgtacccagtaatgggattgctgggtcaaatggtatttctggttctagatccttgaggaattgccacactgtcttccacaatggttcaactaattgacactcccaccaacagtgtaaaagcattactatttttccacattctctccagcatctgttgtttcctgactttttaatgatcgccattctaactggcatcagaatgtatctcatcgtggttttgatttacatttctctaatgacccatgatgatgggctttctttcatatgtttgttggccgcataaatgtcttcttttgagaagtgtttgttcatatcctttgcccactttttgatggggttgttttttgcctgtaagtttgtttaagttccttgtcgattttggatattagacccttgtcagatgggtagcttgcaaaaattttctcccattctgtaggttgccagatcactctgatgatagtttcttctgctgtgcagaagctctttaatttgattagatcccatttgttaattttggcttttgttgcaattgctattggtgttttagtcatgaagtctttgcccatgcctatgtcctgaatggtatggcctaggtttatttctagcgtttttatggttttgggttttacatttaagtctttaatcaatcttgagttaatttttgtataaggtgtaatgaaggggttcagtttctattttctgcacatgtctagccagttttcccagcaccattaaatagggaatcctttccccattgctttttttgtcaggtttatcaagatcagatggttgtagatgtgtggtgttatttctgaggtctctgctctgtaccattggtctatatatctgttttggtaccagtaccatgctgttttggttactgtagccttgtagtatagtttgaagtcaggtagcctgatgcctcctctagctttgttctttttgcttaggattgtcttggctatacaggctcttttttgattctatatgaaatttaaagtagttttttctaattctgcaaagaaagtcagtggtaccttgatgggaatagcattgaatctataaattactgtgggcagtatggtggccattctcttgatattgattcttcctatccatgagcatggagtgtttttccatttgtttgtgtcctctcttatttccttgggcagttgtttgtagttctccttgaagaagtccttcacatcccttgtaagttgtattcctaggtattttattctctttctagcaattgtgaatgggagttcactcatgatttggctgtttgtctattgttggtggataggaatgcttgtgaattttgcatgttgattttgtatcctgagactttgctgaagttgcttatcagcttaaggagtttttgggctgagatgatggggtttcctacatatacaattatgtcatatgcaaacagaaacaattagacttcctctcttcctatttgaatatgctttatttctttctcttgcctgattgccccagccagaacttccaatactatgttgaataggagtggtgagagagaacatccttgtcttgtgctggttttcaaagggaatgcttccagattttgcccatttcatatgatattgcctatgggtttgtcataaatatctcactattttcagatatgttccatcaatacctagtttattgagattttttttagcatgaagggatattcaattttatctaaggcctttctttattgagataatcatgtggtttttgtcattggttctgtttatgttatggattatgattattgatttgcgtatgttgaaccagccttgcatcccagggatgaagctgacttgattgtggttgataagctttttgatgtgctgctgaatttggtttgccagtattttatggaggatttccgcattgatgttcatcagggatattggcctgaaattttctttttttgttgtatctctgccaggttttggtttgagggtgatgctggcctcataacatgggttatggaggaatccctctttttctattgtttataatagtttcagaaggaatggtaccagctcctctttgtagaattcggtagaatttggctgtaaatccatctggtcctgggctattttggtgggagactattaattactgccttaatttcagaaattgttattggtctactcagggattcgacttcttcctgatttagtcttgggaggatttatgtgtccaggaatttttccatttcttctagattttctatttatttgtgtagaggtatttatagtattctctgatggtaatttgtatttctgtgggatcagtggtgatatcctgtttataatttttcgttgtgtctatttgattcttctctcttttcttcttcattagtgtagctagttgtccatgtaattttgttaatcttttcaaaaaaccaggtcctggattcattgatttttttgaagaatatttcatgtctctatctccttcagttctgctctgatcttagttatttcttgccttctgctagcttttgaatttgtttgctgttgcttctctagttcttttaattgtgatgttaaggtgttgataggaaggctgggcaccttcctatcaggtagatggtctagagctccagacagcaccaactcctcctcatggcctctttctcctcctacaactcttcattctcaagcctcagccctttcccgagataggaaggacaagaccatgtttcaggttggttgttttctcttgtgaaataccacctcaggcatcagaaagcaaacatacctcccccgctggtaaaaggaaaaagagtgaaaatgtattgtgtgaatacattacatttctatgtgaggcagagtgtgtgattctgttttagagatgaagaaaggaatggtggatctcagacttaaacccaggtcagtacgacttcatgatctgcctttctgctctgcttgctgcctgcctatgatagcttcatgcaagggcccatgcccagattatgcagagagatgactcttaatggttgcactcttagtggttaaaatagggtctgacatagtatctattgactggccaaatgtcagtagtagccattcgagaggctgaatgtgatatacagtcactcctgagggccaaattgcacaatcccatgttacactgtgactctggggttcagtgcaacaggcttaggtgttttcggtattcttagcaacacatctggatgcaagagattgctcaagtcatcttaaaggcatagtgttacttcacaaagcccttattatacttgagatatgtgcattcaggctgacgactgtcctgaagtatagttgcaacttgtttagatccacaaatgcttctgggatattggtatcctttgtatctgaacccaccttaccaaacggccacatcaacttcttggtaggacacaatgttactatcagcatgaaccttatattctgaccagacccatctcccctaccaacccactccagttagagacaacttgcttaatatctgtctctatgtactaccagattttatttccaatgttgtccccacagacgggctgcttttacaactctgcaaatccccttaaacttgtattaacctttctaccatatagcattaaaaaaaatgacaccagagagtaacacctcattttatctcatagaaggcactgaattcctacccctacagtaacccattgcacaacagttgcagctttctctccttaactgtctgtataccttactgccactgaaatcctagcagctgggtggcacctgagtaaactttaggcaaccccgtgagacctcaaggactgcagaccccaaagtagaaaagagacaacacaagtgcacaaggcagactcactgttggcatgtccatcctatccacattagtctcccatgattacataggtggtgtggttttaagatgtgacccctccccttaagtgtagcctagacttagtactcatgaatatagcagaagtgatggtgacttaagagactgggtcataaaaggcaccctggcttctggcttgctctctcctttctgattacttactcggggggatgtcagttgctacaagatgaaggcctttagccctgggaggcccacaaggtgagaaactgagacctctattaacagccagcaaggaactgaaggctcctgcctgaagtgatcttgggagcagaccttgtaggccccagtccagcattcagatgactgcagcccctgccaacatttgacagctgcctccacaacactgggggagatactgcccagaatttgaggagtctgctgacaacctctgggaatacagaatgagttaaacttttcagccacaaactttgaggtctgaggggtgtctgcatttgttctgttggccataaaaccctacatcccaagtgactctgctgcagttccataaattacttttcatccctaccccttgcccccttctgaaaccttatttcccacggtaaatactttggttatctatatataaagtgcctgttccccacctcttgacatgtcttctctctttggcagctccaggcagcagaaggctcagaccagagcagacccaggtctcctgagtcaccaagacagagagcttatcctggaggaacacatgatggtgtgctgccctctacaaaaccaggcttgtgggctcactagttcaagaaggcaggactgaaaaatggaaacaccgtggctcctaattatctagactgcctcatctcctaccagccagcaaaaatgatgtagcctctgagaatatttacatcactcatttgtatgccttatctttggtacagggagttgggtgaacaggagaaaaagccaaaaaagttatagaggttacaacatgaatctttaatcataagggattgttccatcaggctaatttataaaaaatagctctactgttattataaaactgaaagatactttgttacaaagtaaaatacataaaagtacaacatatgtattatacattcagaatcccaccactagagataagtagttatatgtcctctcccacatctttttttctctgttgctctaaacatacacacagaaaaacatactaacaaaatggggtcatgctataattgttgttctaaaactctcctggttcactaaatacttcatgagcaacctgcattgtcattatctgtgtgcctgaagatttctagtggctttccattgcatacatatgcctgaacttatctaaaaaatttcctaccaatggaaactggaatattaacatttgctattttaaaaatgttttaaatttaaaaactccaccttctgcatgcgtttttgcccaagtgggcaactatctcccaagtatcaattactacatatttactgccacttcaaaggttatagaaattgaattgatacgttaatgaattcttttgaaaacaatgcacggattttctctctcaccaataagtacataagacttattacgtccatttttgcactgctataaagaactacctgagactaggtaatttgcaaaggaaagaggtttaactcacacacagttccacatggctggggaggcctccgaaaacttagtcatggcagaacgcaaaagagaaataaggaccttcttcacaaggggacaggagagagacagcgaggaagggctacaccttaaaaccatcagctctcatgagaactcactatcatgagaacagcaagggagaaatctgccctcgtgatccaatcatctcccaccaaggccctcctctgacacgtggggattaaaattgagatgagatttgggtggggacaagagccaaaccatatcagactgtttctacaacccccccccccgcccccactgatgggggatttgatgattctattttaatactgctaacctgcagggtgaaatagcatttgtgatttttaagatacctaatatttgatatgttaaactatgaaatgaactggagcaaaaccattatattcatgacagcaataaaacaaattcctagaaatatgcttaagatgactcagaacctatttttaaccatctctaagaaatattactgagggaccatatgaaatactatcagtggtaaaaaaaaagtcatttttttaaagtgaaaaaaaatcagcatttcaaagacgccacattctttcaaaattaacctataaattcaatgcaatgccaattaataaatttatttaattaataattcaatgcaatgccaatcagattttgctttttgaacctggaaagaagacatatttctgtagtgtactacaactcctctgaaagctgtaaagcttacctgcaagataaaacagtcataaaaacatgataaaaatgtgagacacacacatcacccagatctgccaagagaactttgttcctggtcttctcagagtgacttgtttcaataaatgttaatgttatctttttgtttttataaagcgatctttaaaaagatatgtaccaaactggttttagaaaggtggaaacttgtttctacactgtcccattggtagctatcaacccacacaaagaatctatgtccataattagcaccttggaaacattctcaccacttgtacattgtaaaagctccctcccaggcagattctgatggaagtgaggattattactgaaaccactgctgcactgtttctttaaagcctactccgctgcacaacagactcttaaagactgaagtttgtaactgaagtgctaacctatttatcacacatccaggtgttcccttcctatgcagactagaaaatgtaaaatcatcagtttctcctatagccctcctacatgtcactttcctatggtttttctcctgtgttggctctcagatggatagaaagctctgagtcccagatggaatcctctatgtacatctacttataagggttctcgcctaaatgcactctttggtggttccgcagacctgaggtataactgaagcctttcccacacacaccacacgtatagggcttctctccagtgtggactctctgatgaacatgaagacaggagttgcggccaaagcccttcccacactcctcacatttatagggtttctcaccagtgtggaccctctgatgaccttgaagatgtgagctctgactatagcccttcccacacacgtggcatctgtatggcttctcgccagtgtgcactctcttatgactaaggagacctgagccatatctgaaacccttcccacattcacaacaagtgtagggtttctctcctgtgtgcaacctctggtgggtgcgaagattagagccataactgaatcccttgccacactgatcacacgtatagggcttttttcccgtgtggactcgctgatgtttgtgaaggcttgatgtgcacctaaagccctttccgcactcttggcatctgtaaggtttctcgcctgtgtggactctctggtgaatgagaagccctgagctgtaactgaagcctttgccacactcagcacatttatagggtttctctccagtgtggaccctctgatggataaggaggtcggagctgtagatgaaacccttcccacacacgtcacacacgtagggcctctctcccgtgtggaccctctggtggctgtgaaggtctgaattccgccggaagcccttcccacactcactgcatttatagggtttctctcctgtgtggaccctctgatggatgtggaggtcggagctccggccaaagctcttcccgcactcgcatttgtagggtttctctcctgtgtgcagtctctgatgcatgagaagccctgagctgtaactgaaactcttaccacacacgttacatttgtacagatgctgccccatgtgaactctctggtgagcttgaaggtacgagttgtgactgaaacctttgccacacttgtcacactggtagggcctctcgccggtgtgtgtcttctgatgactgctgaggtgggagctgcagctgaatccctttccacactcgccacagctgtagggcttttctccagggtgaatgtgctggtgtttgtgcagtgcagacttggcacagaagcctttgccacactcgctgcaggtgtagggcttctcccctgtgtgcagcctctgatggacttgaagcactgagctgtaactgaagcccttcccacactcgctgcatttatatggtttctctccagtgtggaccctctgatggacaagcaggtttgaacttcgaccaaatgccttcccacactcctcacatttatagggtctccttcctgtgtgcaccccttgatgaataagaagaaccgatttatacctgaacccctttccacagacatcacatctatagggcatgtctcccacaggggctctggggtggttacgtatgtgcgtgttctgtctgacgccccgaccacgctcaagactcttaacagatttctctcctgtgggaactctttgatgtctgttaagatgggcactgtgcctcaagccctcactaaactcatcatattgacagagtttctctttcaaaggtactcttggatgcgggggaaggtctgcatcgtccctgaagccatttctgtattcgttacttttcaagccattctctccagggttaatgcgatgaagtacagagtttttaatgcagtcttttctgcatttattgcaaccacacggcttgtctatttcagggaatctgtgatcaacatgacaagatatccagcaaaagctgtcatcatcccagttacatttatatactgtgtcttctgtgtcgagatttttacatctttcttgaacatcccctaactggttcacaaacgcttttgcccaagatccttgaatggggattggtcttatagctctccaggctggaaactgttgattttctagaccgataagcccatccccttgtagactgtccaggaaattctcaattggaaaacacggcgtagatgctccttcccacccttgatggggagcagcatcttctgagaactggaagtcttttccttgcagatttactctacagtcttggctcccaggtaattcacctgccacctcttcccagattttgcatgaggagagctctttgtgtgaaaagaaccttaattcttcatcttgaatatactccgtatcctttccattcttgtctcctatgaggttaaagacaattcagagatgagaactagtaaaagactggctcagggacatcagactttcagacttgaactaataatagcctagagaaaaattaggctttatgtatcataactattagagcacttatgtttatgacaagaggaggctcctattaataagttttgaagctaaatgctagtatgatcctattagtaccaaactatgtctcatcatagaattgccaggcaaaaaaagaatttcggaacagatttttatagagaaagttcacttcttcgcttaataatgctgttataactaataatatctgacactattgtaacacttcctatctgccaatgatgtacacatattaactgacttaaacctcagaataatactgaagtagaaaccattatattaccttcattttccaatgatgaaaccaagtcagagagagggtaggtaacctagcacactattccaccatactgtgaggcagtggtggagctggcatttaaatgcaggaagcccacacggccttctccctgcactgtgtctcaggggtgactgtacttctgggtatttgtgagccatacttcaggagggtgccaaattttccaaagtgcaccacctgtgtcatcttgtgtgagcagatgcaataggaatccagaaaatactgttaaggcaggaagacacacaaatatttgacttatgactattacttatgccttgagaacctttggatcccaggctgcaaaggatcaaactgtcatatttaccacagttctggatgattttaaaaatttgtccatgttttctgatattctttattgcctatttttatctttcagggcttgggtaacaagaacctgtttataaccagggactagtacaatactagaagaaagtgagaaattcatctgaggactctcaatattctgggacagtctctgccactggcttgccttctactgcctggctgtttctattagagggacggaagtccagaggtccctcgctcattctgggtatgatattctgtgaaaggcatagagaaaccatgagaaggtaggaactgaacggaagaaatgaagttgcagaataatcatctacaatgctgccaacagtacccacaggcaagacaaggggtgaggaatgggacctcctgtgggcaagctcacttctcactgcccagcaaggctcttgtctccaagacctctaggcctcatggttctcacctggagatgcatttcttggagtttctccatctgttaccccagtcttcaaaaattcctatgttgaaatcctaaatcccaacgtgataccattaggaggtggtgggtcttccggaggtaattaagtcatggaggtggaacccccaggaaagaaattagtgtccttagaaaacagatgcccagagagctcttctctgctacgtgaggacacaaaaggaagtcagctatctgcaccctgacagagggtcctcaccagaacccaactatgctggcaccctgatctcagactgtgccttccagaaataaacttctgttgtttatatgccactcagtctggcaattttttacagcagctgaaactaagagttctataaaaataggatttaacctgtgtaaaaaagccaaaaatatcttctctccaggaacaagaacactccaagaagttcagttccaattacccagaggattcctctcacccactgagagtaggttcctgaaattctcctgcatcacatcttggtacagctgcctctgggtagagtccagcagctctagctcctcctcagtgaagaccacagccacgtccttgaagctcaatggctcctaaaatgaaaaaccattaacacaaacatctactagatgaagacaaactggtgtccacagagcaggtttatagaaataaaaaaatttaaaaatctggattaagaaaatgtggcacatatacaccatggaatactatgcagccataaaaaatgatgagttcatgtcctttgtagggacatggatgaagctggaaaccatcattctcagcaaactatcgcaaggacaaaaaaaccaaactccgcatgttctcactcataggtgggaattgaacaatgagaacacatggacacaggaaggggaacatcacacaccggggactgttgtggggtggggggagtggggagggatagcattaggagatatacctaatgctaaatgacgaggtaatgggtgcagcacaccaacacggcacatgtatacatatgtaactaacctgcacattgtgcacatgtaccctaaaacttaaagtataataataataaaattaaataaataaataaaaatctaaacaataaagataaactgcatatctctaaaaaaagaagacaagatagcaggaagttgttcagcccggtgtgtcaactccagtttattaatgtttggtgccagtaatttcaattctaaccaactgaactaccccagatatgcagcatcaagcaagaaacacatcatatcctgtgctcacttggggcacttttttttggacacagggtctcttactttgtagctcaggatggcatgcactggtgcaatcacagctcactgcagcctcaatctccagggttcaagcaatccccatgcctcactcaacctcccaagtagctaggactacaggcacgcaccaccacatccagctaatttttatttttttgtagagatgggaccttgctatgttgctccggctggtctcaaattcatggcttcaagtgattctaccatcttagcctcacaaagtgttgggattaacaggggtgagccactgatatttggatatttgcccactgatatagtttgggtatttgtccctgaccaaatctcatgctgaactgtaatccccagtactaggaagtgggggtgggaggtgtttggatcatgcggtcagatccctcatgacttggcgctatcttcatgatagtgagttcttgtgagatctggtcatttaaaattgtatggtacctctacccccgccccccaactctcccgccacacttcttgctttaggcatataaagttcctgctctcctttcaccttccattatgactgtaagctttctgaggcctccttagaagcccagcaaatgccagcgcaatgcttcctgtttagcctgcagaactgtgagccaattaaacctcttttctttataaatcacccagtctcgggtttttgttttggtctttttgtttgtttgcttgtttttgagacagagtcttgctctgttgcccaggctggagtgcagtggtgcaatcttgactcactgcaacctttgcttcccgggttcaagtgattctcctgtctcagcctcctgagtagctgggactacaggcatgtgccaccatgcccagctaatttttttgtatttttaatacagacagggtttcaccatgttagccaggatggtctcgatctcctgaactcgtgatctgcctgggtatttctttgtagcaatgccagaatggcctaacacacctagcccactgtgagcacttcttcaggaaatttctctgaactggatcaggtgaatcacctgtctgcacattttataatctgactctgacttgtagattgccaaatttttctccaagaagtctgttacaatttacagttccaacagtgcctagtttactgtgcccatgcctgcatgtaccccgaaaacattctctctgccagaatgatggttctttcccaatcattcactacccttccatcaccaggtaggcaaatcctgctctttgctaccacagcccctcttcccttccacactctttttaagggacttccatgtcaacaactgacagaaatcagctaatttatgtcatgcaaccatctcctcaaccaggtgagacctcaaaagtagcattttgaaccaaggaatttcaaactatgctgtgtccccttcagctacgaatggtggcctgtgtttttaaagctaattgttccagttcagtgagaataaatggcagtcatgtattctgcaatacagtgatcatcaaaatattactgtaatatcattgctgtcttcacttggacagtggcaagctttcttgagaactgcatatgagggctctcagaattatactttgccttcagcatgtccctggagtacctgcgacaaggtattgcaagttaagaatgagatgaatgctttcacttgacttttttatttaagtcatgcatatatttttgatacgaaggaatggtagctatagaaagttttagtgcatattacatggtttgtctctgtccccacccaaatctcatcttaaattgtagctcccataattcccacgtgttatgggagggacctgatgggaggaaattgaatcatggggggtgggtctttcccatgctgttctcatgatggtgaataagtctcacaagatctgatggctttataaacaggaattcccctccacagcctctcttgcctgccaccatgtaagacatcccttgctcttccaccatgagtgtgaggcctccccaaccatgcggaactgtgactcaagcctctttcctttataaattacccagtctcgagtatgtctttattagtagcatgagaacagactaatacagaatgcataccatattactttttcaagaaatattcagtacctataaaataatgttaggcaccaggaattagagagatgagccaaaaagctagagtttcatggagctagtattggcagttcctaaaaccagatccaggtcgtatgattggccatgaggactcacaggagctgatatacagtgacactcatggctaagacttactacggtgaaagaaaataaaacacaatcatcaaggggaaaagacgcatggggtgaacttggaaagaaaccaggtgcaagcttccaagagtcctttcctactgaagtcacacagatatgcttaattcctccaaaaataaattgcaacaaggcctgtgaaatgctgtctatcagagaagatcagcggagactcggtgcccagggttttcattggggcctggacacataggtacctcctgactagcacataccaaagtttcagacttccagaaaagcaggttttcagtagaaaccatattgtttgcagacagtccaggtactgtatgccattcttatcagaagcaatgtttacagaggcaaatgctttgtttgagaaagtaaaactggatctaaattctgaggcataagtagaaattaactgagggaaaacagaggagagaaaattccacacagtgggaacagttggtgaaaacccttaagtggtaagaagcacggcacatgtatcttagcctcaggcaatgccgctgtgaagtaggcggtggccagatcactcagggcctcttaggctacattgatgattttggtctttcccaaaagcaggaaacaaataaacactgaagggtagtttacagtgggtagtgataagattaggtgagctgtcttaaaattatgaacccgacacagcatggaaaaacatagcaatggatcaagtatagatacaaggagaccacattggaggccactgcaatatttacagggagacatgttggcccggactcggacatgggaggattacttcagcctaggagttttacatcagcctgggcaacatggcaagaccccatatctacaaaaaatagaaaaagtagtggcatgtggtagtgtgcacctgtagtcccagctgttcgggaggctgaggtggaagcctgggggttcaaggctgcagtgagctgagaacgtaccactgcactccagcctgggtgacagagagaaccgtgtctcaaacaacaacaactacaaaaaccaacaccaacccaaaaaccaccataaaaaaagggcaccattactaagttctagccaaactttaattccaacaccatttttttaatcaaatttctaaatttcaaaagtaggtgtttaagccaggcacagtggctcctgccggtcatcccagcactttgtgaggccaagatgggaggatcacttgattccaggagtttgagaccagccttggcaacatagggagacctacatctctacaaaaaataaaataagctaggtgtgatggcgcacctgtagtcccagctacttgaggtggaagaatcacttgagcctggggggtcaatgctgcagtgagctgtggctgcaccactgcactccagcctgggtgacacagcgagactgtgtcttaaaaaaaagttggtattcaatgcagatgtacaagtaactcggtgaaccagagcacagaatgcaggagcagtcaggtccatgtgaaatatcaatcaattgctgtatttccttctgtctttgtatttgatatgtatacatacatatatgtgtgtgtatatatatatattttatatatttacatgtacaaacataaatatatatatatttacacacacacaaatgagggtggtattttggttgactcgaaaaagaatgattgatgtaaaaataacattttcataactggctatccatcttgaagaaatgaacttaaatgtcaaccttatgtcatttacaaaaataaattacagttatactagggataaaacattttttcagaccttgctgatgagaaaaacatttttaatataaatattaaagagccatttagatgactttttgattaatctgagaatggataaggtcttttgaaactacatgaaactaaattttcaaaagggaactaataaatcatttaactatataagaaccttaaacttctttacagttaccattaagaaagtaaaaattaagaagacatacatgcagccaacaaacatatttaaaaatggtcaacatgactacagaaatgaaaatcaaaaccacgagataccacctcaccccagtcagaatggctattattaagaagtcaaaaagcaacaaacgctggcaaggttgtggagaaaaaagaacatttatacactgctggtggaaatataaattagtttagacatcatacaaagcagtgtggtgattcctaaaagaacttaaaacagaactaccattcaacccagcaatcccattattgggtatatacccaaaggaatataaattattctaccataaagacacatgcacacacatgttcactgcagcactactgacaatagaaaagacatgaaatcaaactaaatgcccatcaacagtagactagataaataaaatgtggaacatatacaccatggaatactatacagccataaaatagaatgagatcatatcctctgcagcaacatggaaggagctggaggccattatcctaagcaaagtaatgcaggaacagaaaatcaaatactgcacgttctcacttataagtaggaggtaaatgatgagaacgcttagacacacagagggaacaacagacacagaggcctacttgagagtggatagtgggaggagggagaggatcaggaaaaataaataataggcattaggcttattgcctgagtgacaaaataatctgtacaacaaacccccatgccatgcaattcacctatataacaaacctgcctatgtaccctgaacctaaaatttttaaaaaagtaaagattgagagaaaataattataacacttttgataagtgtttagaagggcttctaaaaacatggtaaaaatgaattaatgagaaaataggcaaaagtatttcctaagcaatttactgatgagaaaatacaaatatagccaatatacatatgaaaaagtgcttatcatgtttacaatgcaggaaactgcaaaataaaatggggcatctttgccacatatcctccatcagatgagcaaaaatatttagtactaatcattcttgggattgaatgtgtgcagaacagcaaaaattgctatgatttcttctcaaatattgtggcaataatatattaacagtttacaacgaagtgtgtgacgctgtgaaatagatatttggtctctgtggcatataactccaaaagcccttagaaactccaccgtgatgtctttttctatgctaatgggttgactagtagctggcagctggcaggtagcttcaggatggggctgcttactggaaagaacaaggaaggattagaggattagacttatagtacttccccctcccccaacctccagtgaggggagaggagctgagggtgaagttgatcactggtgcctacctaatgaaactttcataaaaacctaagaggaccaggttcagagaaattctgggaaggtgacatgcccagagagggcatggaagctccatgccccttaccccatacctttgccccatgcatctcttcatctgtatccttttgtgatatcctttataataaaccagtaaacataagtgtttccctgagttctgtgagctgctctagcaaattaatcaaacccaaagagtgggttgtgggaaccccaacttgcagctggttggtcacaagttctggaagcctaaacttgcaactggtgggagggaggagcagtctcttgtgggacagaaccctcaacctgtgggatctgacactacctccgggcagacagtgtcagaattgaaccgaagggcacccagcaaaactgccacaaaactgattgcttacttgaggagaaacccacacacatttggtcacagaagtcttctgcctgtgattattgttgctgagtgtcagaatacaaacagcacttagagtttcagtagctttttccacactaagtatacccctttgggccagcaatattcagacatttacatcatagaatttaaagattaaagaacaggatgcaaaaatcacatgtgtttgtactgtttgtagtgctaaaactggtagtaatcagaactgaatatcttatggtagtaaaatacacactacatggaaagcatacatgtttccatttccttttttttgagatggagtctcactctgtcgcccaggctggagtgcagtggcatgatctcagctcactgcaacctccgcctcccaggttcaagcgattcttctgccttagcctcccgagtacctgagattacaggtgtgcgccaccatgcccggctaatttttttacttttggtagagacagggtttcaccatgttggccagggtggtcttgaacttctggcctcaggtgatctgcccgccttggcctcccaaagtgctgggattagaggtgtgagccaccatgcccagccccatttcctttttaaaaagaaggtaacatatattttcacatgacaaagatattgatggattcacacctctttgttaatgttgggcatattagcgaggacagttgggggaacctaatttatttcattatagaccttggtatggtctgtcttctactaaatctttattttaaaagttataatgaaatatatataaactagtattattaacatggctgagctacagaggtttaatactatgagtgagtatggcagacaacccaaaaacatctccatgggagtcccacagagtctcacagttgtaaactgcacagaccatcttaacacacaggactcaaaaagctacacccactcaatttttgtgtaggggggagcttgctagaaaaagaattaatcagaaattttttaagtgtaaaaaaaatcgcagctaggattggaagaaaaaaacaacttagagcttagcctaaacagatgaatgaacatccaagaagaaagaactgtaaaacaggacaggattctggaacacagtggaaaatggcaaaaagaaagaagaaagaaaagaaaaagaaaaggaagaaggaaggagagaaagagaaagagaaaataaagtgaaagaataggaaggacagatccagaagttacaccatttatccagtaggcattccaggaagaccaactggattaaataatagtaataattgacatcaggcacaaacagaattaatgcccgagagaacagagcaaggaaaataaagtgtgatccatgaaaatgccacacacccaagcataaacacaacagatgcttctagaaaaaaatgacaagaatgaatttagctcaccagaaggtgaatggagaagccacaatacaaagtcctacacaagacttaatacaagaagaaaatgacacaacctgtactgagtccagaaagtgtgaatgaagaattttaagccctggcaacttgcaatttgaacataaaaccaacattcttttttttttttttgagacagggtctcgctttttcacccaggctggagtagagtggcatgatcttggttcactgcagccttgatttccctgggctcaagcaatcctcccacttcaacccccaagtagctgggactataggaatgcaccaccacacccagctaattttttagtatttttgtagagacaagattttaccatgttgcccaggctggtctcgaactcctgagctcaagtgatccgcatgcctcagcttcccaaagtgctaagattacgagccactgcacctggcccacaacattcttaaacttggaaaaatgcagaggatactatagccaagtctttggcgtgggggaacaaaaagactgcatccaaagtctttgtagatgaaattgaggcaaccaacaaataaattcaagtaagaaagttgtggtaaaaggagaggcggtgagcaatgacttaaatacacagaagtgagtctcaactgggggaacttatggtgacgaatcagaagataacaatgacaataacaatataataacaatcagaagatggtaggaagtaaaaacgtgctaattgcttcaactttcacagcaggaagtaatcaataatatttaaaattaaggtacacagtaaaagaagtgaatcaaatcttcaaaattatttcacaatctcttttcataaaaagaaaggtttagaaaataatgtttcatgtgttgaaaaaacatacttaaaattctgcaatggctatgatttttttcagtttaaaagaaaattaagaaatatgtatatactaaaggatagcctatttccatatccctatattttcatttactttatatcgcttgatagcagcttagaatctagacaaaagaacgaatgaaactacaattcactaattcaatagatgaacatggaatccatatcactatatgtgtgtgtacatatatatgtatatatatttgtagatatgtgtacatatatgtgtatatacacatttggctgttatgaatgatgctgcaattatcattctttgcacatttattctgacttagaaaaaattcttagagtgggaaatgctcgaccagaataaggagaacttctagaaaggcagaaatactcctgcagctgtgtggatgtacccatttctccatatcccagctaacagtgcatgttgacctttcaaatctttggctgtctgctagaataatcataaatcttatttcaatgtgtatcattttgattaatagaggcttatagtcttttcatatgattagtgggcattagtttttctctgctcccttcctgaacaagaatgctcaggtctttatgcataaccctcttctgaaaataaggatattaaaattttgtcatagatgaaacttttctaatatgtttttctttttttaactttgtgcatggtatacttttggtagggtctactacatggagaacattacatctataaatgaataacgttccacagaggagaacaacccaggcagcgatgattcagtatttggagagtcatctctctgctaatctaggcttgggcctctgcgtgaagctattgcggtggcaggaaggcatagcggaaaggtagattatcgaatccaattgacctacctgagttcaaatcctggatcccccattcatttcttcatctctaaaacagaatcatactatctgtctcacatcactattttgtggataaatgcaacgagaaatgtattcacccaatacatttttcgctctttttccttttaccgagaagggacgtatgttttctctctgatgcctaaggtggtatttcgggagagaaaagaaaacaacccacctgagacatgatcttctcctccctatcttgggaaatggctgaggcttgagaatgaagagctgtaggaggagaaagaggccatgaggaggagttggtgctgcctgaagctctagatcatctacctggtaggaaggtgcccagctttacagactggtttcttctcacttgaggaaattcctcaacatccaactttttctcctccacactcagtttggattctccccccacccaccccctctattagctgtcacctcttttctcatgccttgaggtcaaagtctccatggtctcttctgctaggttctctgcgagcagcagcaactgtatttattctctggttttcctaagctggagacgcagaagatccaggcctttttcattccggaaactctccaagctctgacaagttcctgtctccacctttactgtccagagcgcgactgcttcccatggtcaggggacctgtaggttcgggagggaactttacttagtcctttcttctgggccccaaggctgtggttcacatcccctggatactattcattcagtagtttacaggacatttactgagtacttgttaggtttagtcccctactctgaaggggctcatagtccacaaagccaagagtgttgcagatgggtaaggacagtcacagaagagtctgtgaggagggtcctgcagctaaattctcagtaaggcacagggcccctcagaagggcagagagaccccacaaatatatgggacctgtgacctgtgaagaaacacctggagaggaaaagctttattaacgcaatactgtttgacttgcaaaaaataaaatacaataaatccccatacttagggattatagaaatcaggatatagattagagccatctttagtcagcgtttttaactttttttgtgccatggccccccttcactaatctgatgatacctaaagatccctactgagaataaagttttaaatgcataaaatgaaatgcaaagaattatatggaaatacaaccttcaaaactattaaaactctgcatggctcactgtgcaagtatagtgccactttattaatacattcaatataaacaataaatttaactacaatttcaaaagagtaatgagcataaacaatactctgaaatatttgcacaaaccagaatatgacataaaaatatctatgatgtatatggatgacaaagtcacaagtactgctaataatattgtggcttagcacctatgttcacaatgaaatgctacttgtgacttagactagtataatttttttcccattcaaattcatggaactcctgagttatgctcatggagcccagggcaagaattccttttcaaaattaagcctcttctgccccgccccaccccccagactgaattaattactctgggatccagcaacacatggtataaattgctggttaccacctttcacacggcctccatggtcagatctctaagtcatcaaaataattgagtcttctttttctttatttacctttcatggctctggcacacgggaagcacttaagggtcctaagcaattctatcagcaggaggtgatgcacacagattgaacaaaactcttacaatctgctcagagctactcgggaggtagtgcaaagacagtggacatgagtttccacccttccccaccttgcctggcctctttcctcttgaaattcaagtctcaaggtcaagttcagacaaacagatacacatacttgggctgtctactctaggacactcactggattttactgcttcaggaactcaaatctccttctttcctctaaccatctgtaccagccctctgcatggcccacagtgacaagcatctttctctctccctcccttcatgcactgccctgaactggggattgccctttgacccaggtgtggacaaccaggcaacacgctaccctcctacacaaaggacaaagggaagagtagaggccagatctgaaacaaggcctccaccgcaatgccacttaaactcaaacttcaggatcctctaggactgcgctttgcaaacttcagtatgtttaaaaatcaccatgagcaatgatgaaaacagactgctagagtccagctccaaagattctaattctgtatctctgcagtagagcccaggagtctgtgttttaaacgtttccaggggatgctgacaaagtgagtccaggggccacacctgaagcaaacttgctaagttaccctcacttcctctgactggctgattttcagggtttccagagacttccggtgggtaaaaattttccttgtgcttcctcctcctatccctgaactcttcaggtcaggaagcctcaagagtcagcacataaagttctctatcttctttcactcccttggtgaacatatccagcctcaggccttcaacacaatctacacactgatgactccatggcaacctgccatctccactcttatgtctaaaaagcaactcaaaaaacatgttcaaaagaaaagtccagatttgcccctagaggtacttctctcctttgaaatgaagaggaaatattctagtcatccttgatttcttcctcgtactctacatccaatccatcagcaaatacctacaaatcagaaccagaatcagattattcttgctgccaccgtccacaccatcatgtctcacctgcattaacgtgacagccccctaaatggcctctgcattcctactcctgttcgtttcagtctacttcctacacagcagctggagtgatcttttaaaaatataaactcatattcttctctggccaaaaccatcattttactcaaaaccttgcaccaaggtcctttcaatggcccaaagaccttacactatcttccttcccaatattcagtttcccacttatcctccctctttctcattctgctcagctctggcttccttgctgttcttcacatgccctcatcaccgggccttcgtgttgttctctttgcctttttcatcagatgcctgcaggcccctcacctgctttgggtccctattcaagcaccattttctcagtgaaattcatccctcattatccttctcaaattggcaaaccagcacttcctacaccctcctctgcttcatttttctccatgaaactgacaccctacctacagtctatttttcttgttgaccatctttctccacccacaagaatgtgaactctatgagggccagtatttcagttggcacctggcacacagcaggtgctcaataaatatttaaatgggagaacgggagtaacctgaactcagcttgctgatatggatccttgggtcctcttgatgtcatcttcacagcagaagtgattttcttctccagttcatggacttagtaatttgggtgctaaggactatgctggctgtgttgggacccaagagtgaacagggcagacaacgactctgtgctcatgcagctgctaacattctaggtggaaatcagcagccataatgaatatctactgtgttccatgtgcttaggatacatttctggactgcatggagctcacattgggggagaaagagggtgacagaaagagttggtacaaaggcagtgggacaaagaagtaatgggaataagagataattgcagaggtagaaataacaaaactaaaagaataattccatgtagggatgaagaggaggagaaataaatatgattctgaggttgaagtctgaggaaaacaggtaaattatgaagttatgataaaataataagatagcaaaagggaaagcagggttttgaaaattgcagctctagtttctcaaaactggagttatcaaaaggtttaggttcgaattctggttcagccactttgtagttatattaacaccacaggagagacttaaccttttgaatgagtctgtacttctgtcaaataaagataatccttacttgcaaaactaaaataatttaagtttttctctctttcacacacacatgcctatgtgaataaacttcaaagcccagtacgtggtacacagaaaatcatcaatatactattaccattgacccaacccagcattaacctaggaatacaggaactcatgcatttagtaaatgtacattcagtgtctaacaacatcttaggagaataaacactagacatacagcagtaaattaagatggaaaaggtaattgttctcatggtgcttactttcgggtgggttaatctctctacaaattaggtgacctttggttgcaaaaagggctatgaagaaaataaagcaaacatgatagattcctgttttccaacaagaatgtaggtgctatcaggtgaacatatgtggcagctgtggaaagagcaacattaaatcaggtggtcagggacagtctctaagagctgcctgacaaataaatcagctgtgaaaaaagctgggatgagacaagtccagaaggaagcataagcgcaaagacctggtttctgtttagaaggtctcctggccaggtcttacctgttaagtttttttaactttttaaaccttagcaactcatctgtgacatggggataatagctaacatacaaacttgctcagaaaattcaatagaaatacattcatttattcaaatatttattggcaagcctggcactgtcctagacaccatggataaataatacctggcatatagtaagcactcagttaatatacaccatcacagttactctaattatttctaccctgcgtttcttcagcatggcgctgaaacagtgtaagcctttactgacccagtgacacactactaggagccaagaagagaatacactaaataaagacactgggaaattcctcaaacctcccccatttctaggggaaggcaggtgtggctaaggggtctgaatgaacatttgtgatatcaatgggatgaagaatgaggtcaccaagagacctggcattgccacaaaagagaaccaaagttcactcacctggagctctagtgtcaagagatgtggggttatttctccttcttttatacaattatctccgagaaacgaacaattccaagaaggaagcctgtgaaagaaaaatgaacagcaggataacatgatttaatcccaattcccaccacgccacagggggaaatctctcagtgccagctggatgtaatctaccccttcctgtaatctaccctcgctacttgcttcaggagccgaggaaaagaacctctcttcctacaggactcagagtacaagggacacgccattcctgatgcccaaagaaaccgtctacaagcctactttcactgcccctttcaggagacaaggagaatcaagacaaaatctcaagattttaatccagagctgactgtcacatgctgtgggacacttacaagtgaaattctgcctgtgtgtgcttaggcggctacaaaaagcagagccagcaacgatacagcaaaccaactcctaggacttgcacagcgcttaatacatttcaaaggataaaattagaacacagggaatcaacttcctgtttacagaaatgacttcgcagaaaactctgaaattactccacaagtgggtgggcggctaccctgagaaaattcatgtcatcgatccgcaactgacacagtggagtctcccgcactgcagatctcatctcaaagccagagctggcctcaaactgcttttccaagcctggactgcgagggctgccgacccgggcccaccccgcacaggcgctcagaatgttcgatacgtgcgcctccttacacccctgcctcaccaggccgagctcatggaaatccgtgggcttcgaccctccgccgcacgttgtcccttcacactggtcctatagagccgatcctaattcccatggcctgacagtacaaccgcatggagatgcacgtctctaagacgcctcaccactgcctaagaagcaatcaaggtgacgcgcccaccggaaacggaagtagtcgactcgaggtgtgggactacctttcccagaaccctccgcagcgcagtccgatcctaggggcgatggtgtcgtaaatgcgcgtccacctcgagtcacgcccactgcgaggcggcgggaggcggcatgcaaggtgtttctgagttgaaaagaatgtctttactcagtactaacatattcgcgttgtagcaaacctgactatattctcaaacaagcccatcatcccatcaccagggatataaagcattattgattttctggtgtaaaagccaactaaatatttatttcaaaagtagttcatattacatgtaaagaatggtttaaaaaaaattcttacttaatccctggtttatgtgagtaaatatgaattcttaagaatcccatttcccaaatggcatcataatattttgtaatcatttcttgccacaggtcatatatcgtggatagttctgtatgtcacaaaagacgtagagatacatagagataataaaaaaacacaaattatttgcaatacttgcctagcattctttagtttttagggaagttacccctttgtcctgcattgaacttacacttctaattttatgatatcaaaactacacacaatcactttctttaatattttcccaatttgatggactaaatatcctgtcttattttcccaatttgacagagtaaatatgcttattaccgattgcatttcattgtcatcttttattgtcatacactctctgtgtatgaatgatatcgcttctaagtgatgaattgctcccccagtttcaacatttataaagtagtttagaaaaaaaaaaaaacaaaaaacttcatctgacaaggtatatcagtcttttcatttgtggcttcttttttttctccagtatgaccaaaaagacattccttagcctgattcccaataagtgcatatctatattcatttcaggctctttcatttttcttttgaatcaccgcgtgattcatttaagtgtatgatatgaaaggaagatggagtttcctgtttcaccaaaggattgtctacttttcttaacaaaatttacataaatattaattctttcctttctgatttaaacggcatcctaatcacttactacattactatatatataatgaaatattttctgggatacaagtgtgttctgaagatagagattgctttttctgtgccatgatgaaaggtttcagttacagtgataactcatttccttatctctccctccttgttgtgtttcaaaaatttcatcctagaagttctagaactctctcttataaacagattatcgaattgttttgataaattctaaaaaattgccaattgactccaaagcatccaagcccttcagatatttggttccaaacccacccctctttgcttgggtagacacagtcctacttcccatcctgtgtcctccagttttacaaatgtctgaatttgctgctattgttcttccctctgtaagtccatcctttcctgtactattaaaatcttactccatatttaagacacaacttgaatataatttcctctatcgagtgtttttgaactctatatcataattcaatgaacagatcagtctgtgattgggagaatttcatgcgagtgtagtggatgttaaataccactctcagaacattctcatttccccgagaaatcaataaattatattactctgggatccagcaacacatggtttaaattgctggttaccacctttcacatggcctccatggtcagatctctaagtcatcaaaataattgactcttctttttctttattttctttatttacctttcatggctctggcacatgggaagcacttaagcaattcaatcaagtgtcttggccgggc[137 bp omitted]attagccgggcatggtggggggtgcctgtagtcacagctagtcaggaggctgaggcaggagaatagtatgaacccgggagaaggagcttgcagtgagccgagatcaaaccactgcactctagcctgggcgacagcgcaagactccatctcaaaaaataataataataaaataaacataaaaataattattttaaaaaggtgtcttgacctggaagctaagagccaacctgcacaaagtgtgggtagatgaatccattccaaggcccaaggtaaatattcagccttcatcctacctcatacaaactgcaaaacactgtagaaaccgtgtgtcaactgaatttgaaactgctgtaatttccgactccctaacagttttgttattgttaagaaaaaataacccaattttaagtaggcaaggtatttccgtagacatatcttaaacgaaaataaacaaataggcaagagacacatgaaatgactctccacatcctcagtcattagggaaatggaagtcaaaacaatggtgctacttcacactcactagaatggtcaggattgaaaagcagaaaataggctgggcacagtggctcacgcctgcatcccagaactttgggaggctgaggtgggcggatcacctgaggtctggagttcgagaccagtctagctaacatggtaaagccccttttctactaaaaatacaaaaaattagctgggtgtggtagcatgcatccgtaatcccagctattcgggaggcagaggttgcagtgagccgagatcgcaccaccgcactccagcttgggcaacaagagtgaaactaaatcacacacacacacaaaaaaaaaacagaaaataaaaaatgctgacgatcatgtaaagaagctgtaacattccggcactgctggtaggaatttcaaaatctacagccatattggaaaataatctggaagatcctcaacatgttaaacatcatagaagtctccaaatgatgcagcaattccacacctaggtatgaaccaagagaaaacatttgtccaaactaaatattgtacaggagtgttcatagcagcattattcaaagaagtagaaatccatcaccttaaacgggtgaatcttatccagggcatccacgtggagacaggggcagacacagggaaagagaatgaggaaatgtctgaaatggaggccgaaagagagacaatgagaaggcctgtgaatggaagaaaccgagcgcagggaaaacagtcatacgtatacatcagagatctgagaacgcgggatcataccgacagtgtcactgccaggaaagggggtcaagctagggatgtccccggtggcgtcgcccgcagaaacacggacaggtttggggttcacgctggcacgggcgccagcagccacgtcagcaggcaggagggtcccactgcacagctgaggggtgatgatagcccaggtggtgatgtcggccatcagaggggcctctcctgccagcaaatgtgtgacagtagcaagtaaaaggacaggtctttgtgtgaggccggaatgcgggaagggctcttctgtggctgagtgtggagtcctcagcaggaatgtggataaatggccaggtaactgcatcacgttggctaggaggatggcaaggacttcgagctgaatgatgataacggggagtgactgtgagaccctgcgaggctctgagtgtaaaagaagatgggtgcggggccccaggggagtatgtgggagccactgctgtgtagatggaggtcgttggggaagaatctggtgagctctgtgaatttccaggggtctcctgtgtgctgggggctgactcttgcagaaaactggggatggttggagagtagctgggagacaggaaagagaccctaaggaatggcggtacaaaggtcagagaggagcaggaggagcacggtgaggtctgtgagtttccaggtgagtcctgtgtgttaggggctggccccaggagaaatctggggattgttggagaggagcagggggatgctggagagtctctgagggatggggatgcagagatgggagacagaggtgaggagcacagggaggtctgtgggttgctaggtgatgccctgagcatgagaggctgactccaagagaaatctgcagatggctggaggggagctgggagacacaggagagcatctgagggctgcagatgagcaaatgggagacatgattaaggagggcaccgacatttgtgagattctcggtgacccccaggtgtggggggctgtgtgttgcagaaaccttgggataatgggagagtagctgggacacacacacaagtagccaagggcctggagtacagagttgggagacatggggatggagccccgtgaggacgctgagtttccaggtgtttctttggtatgggaggctaactagctgagaaaggtggggaggtctgaagagtaactgggaaacgtgggactgtccctagggggtgggggtgaagacatgggacacataggggaggagtgcagtaggaactgtgaatttctgagtgttgcctcggtgtgtcggtttgactgttgtagaaacctggggctggttggagtggagctgggggaaaccagagagtctctgggggatgagtatgaagagatggaacacattggggaggagcacagggaggtcactgagtttctaagtgattgctgcgggagagaggcagaccccgatagatatctggcaatgctgggagagtagctgggacagacaggagagacgctgagggctggtgaggacatgagacagactggggagtaactcagtgaaagtggtgagtttggtgcagatttatgggtgcctggaactgattcccgcggaaatctgggcatggttgaagagtagctgtcacagacagaagagtccctgagggtttaagaattacccgtgtaagtgaaaagacttttaagaaagagtggagatatgcgttgcataaatattcttttgctctagaaccacgtagagacatgggagccagttgggtggagcattcattggatgtgcttggcttaggaatatcaaggaatatcaaggtgtggctccagataattcaatcatctaattaagttttcagttatgctaatctgttttaaaattctgtttgtgtaaattcttttactcagactgagaatggcaatgcctcaactccaatttccagggagggttgaaagcctcaggttgagctgatcaccaatcgcctatggtttcacccatcatgcctatagaatgaggtctccataaaaacccaaaaggactgggtttagagagcttctggataaaacttcccgaaaagtagtgcgcccctccccacatgccgggcccaaaatccgttttctgaattttttgcaatatccgctatcatacaatggtaaatggaagtgtttccctgcgtgctgtgagcacttccagcaaattcatgcaactaaatcagggagtggtggaaacctgatttatagccagttgctaggaagcacaggtaaaacaacgtagggcttcccactgttcttagagtgggaggccagtcttgcgggactgagccctttggaatctaatgctatgtcccggtagatagcgtcatcattgaattagaagacacatgtatgttgagaataatttttctagtcatttgctgtatgtcttatttacaatatgtaatcaaattctttgtcctgactttatggcacctggattgggaaccatgatttgaaccaaaaggtggtctgtcactttctcagtttgaaactttattttgccgctagcgttttgctattcttttttcgttttgttttgtttcgttttgttttcaagttctggggtatatgtgcaggatgcgcagatttgttacaaaggtaaacgtgtgccgtggtggtttgctgcacctgtcgacacgtcacctaggtattaagcccagccatgcaaaagctatttcccttaatgctctccctcccccaaccccaccccatgacaggccccaatgtgtgttgttccccttcctgtgtccatgtgttctcatttttcagctcccattataagtgagaatgtgctggttggtgttgtgttcctggattagtttgctgaggacaatgacttcacatcactagtgttttgtttctattttaaagactagtattttattgaataagatttattcacagaaaaataagctttaatctacaatgaatgccagagtgtacagcagaaagcaattttctcagttttccacacacaagggttcctagtaagtgaaaaaagccataaaatctcattcacaaatgtactactctgtctcaaaacatttcacataattatgcacaacactaatacaattacatctgttactcagtcaggttaaagtatccctctaataactgatttttaaaatgctctcaatatccactccctatcagtctgccattgttaatggtgtacagcgttattgaatacaatggaatccatgaagcccatatccacggacaaaccgtgacttatgatggtttgatttatgatttttcaactttgtgatgggtttattgggacattagatgcatttctgagttacactggctttatcagtatgtgaccctatactccagaaatagctgtataaaggaaaacaggtgtacctaattaaattatactcagtgacttgagagaaaccaatagatgtttacaattgatggagaaccgtgaaagagagataccagtaaataaaaacaataacacaattttcctgcaactgtcgaggatttcccaaaaaaacacagaaagtaggatgcaccgaaggcatatgaaagagagacggcagaaggagtaagagagaaataggaggaaggaaggaaggaaggaaggagaaaacacctggtgttactaaaaccaaaaaaagaaaaaatggtttcccactctgggtaatggtacaatgtggatgaaccttgaaaatactgtgctaagtgtaaagtcagtcataaaagctcccatattgtataattctgttgataggaaaagtccagaatatgcaaatctatggatatagggttgagcgctctatgtaattgttacctagggctgaggatcggcgagatggtttgagacagaatgaggagtgactcacgtttaccgggtttttctctggtcgggggtgataaaatgttctcaaatggattgcgaattaaaattgaacgtgcacaaccacaagtatactaaaagccactcaattcatgacttttaatgggggaatcttatgtggcgcactctcgtcgagaccacggcagacatagtgaaagagaaaaaggtgagtaaatatctcaaatggaggcagaaacagagagaatgaaaagccctgtgaatggaagcgagagagaaaagggaaaatggtcctatttacaaatgacagatctgaaactggggctcacatcaacagtgtcactgccagggaggaggatcatgctggccatgtcaccggtagtgtcgcccgcagggacgccgacatgctggaggttggtgtcagcatgggctctggcagccacgtgggccagcaggagggtcccgctgcacagctgtggggtgaggatagcctgggcggtgatatcggccattagaggggcctcttctgctggcaagagtgtgacagtagcaagcagatggacaggcctgtgtgtgaggacggaatgcaggaggggctcttctgcggctgggtgtggggcgctcaccaggaatgtggagaaatggccaggtaactgcgtcatgttggctagtagattggccagggcttcgaactgaaggacaataacggggagtagctgtcaggccctgggagtgtctgagtgtaagtggagatgggtttggggtcactgagggatacgtgggagccacccctgtatagatacaggtcatagggaaatagtctcgtgaggcctgtgagtgtctagggttctcctgggtgcctggggctgacagcggcagaaatccggggaaggccagagagaagctgggagacacaggagagtccctgaaggctgggggtgaagaggtgaaagaaatgggggagggtggcagtaaggtccgtaagtttgtaggtgattcctgggtgtgggaagctgactccagctgaaatctggagatggttggagagtagctgagagagacagaagagcccctgagggctgggggtgaaaacatgagtgagactggggagtaactgagtgaaattggtgagtttgctggtgtgtcctgggtgcctggaactgactccagctggaatctagagaagttttgagagtagctgaaagagacacaagagtccctgtgggctgacggcaaagacctgagagggaacgcggaggatctcagtgaggtctgtgggtctgtaggtgattcctaagtgtaggagtctgacgcccgctgaaatctgggcatggctggagagtagcggggacagacgggagagtcccagggggctgggggtgaagatatgagagagactggggagtaactcagtgaaactggtgagtttgtaggtgattcctgggtgcctggaactgactctcgctgaaatctgggcgtggttggagagtagctgggacacacaggagagtccctgagggctgggggtgaagacacaaaagagactggggagtaactcagtgaaactggtgagtttggtggtgattccggagtgcccggaactgactccagctgaaatctgggcgtggttggagagtagctgggacagacaggagagtccctgagggctggtgaagacgtgagagagactggagagtaattgagggaaactggtgagtttggtggtgatttctgggtgcctggaactgactcccgctgaaatgtgggcgtggttggagagtagctggggcacacaggagagtccctaagggctggtgaagacatgagagagactgggaagtaatgcagtgaaattggtgagtttggtggtgatttctgggtacctggaactgactcccgctgaaatgtgggcgtggttggacagtagctgggacagacaggagagtccctgaggcttggggataaagacgtgctagagactgcggactaactcagtgaaagtggtgagcttggtggtgatccctgggttcctggaagtgactcccgctgaaatgtgggcgtggttggagagtagctgggacagacaggagagtccgtaagggctgggggtgaagacatgagagagactggcgaggatctcactgaggtctgtgagtttgtaggtgtttctggggtgcgggacaccgactcccgctgaaatctggacgtagttggagagtagctgggacagacaggagagtcatggatggctgggagtgagctgctggatgatggcagtaagaacatatggtatattattgatgaatgaggtgactgtgaagaatctccagaggaggacacgggagagcacaatgacatcagtgattgtcctgcttggtcaggaaagggaaatgtaaagttgtgaaattctgttgatggtggatgtgagagtggtgaagccctgcggcatgatgtagagtacttccacatccctggtgaggagctgccccttgggtctgagtttctgggaggggagagggagaagaagctgggtgaggcaggcatgaatcttgaggagtcagggctgggggaccgctcataatctcccgagacctgtgagtttctgggggactcctgggtgcatggggcggactctcgcagaaacctggggatggttggagagtaactgggagacacaggagagtccctgaggcctgggggtgaagagatgaaagacacaggggaggagcaccgtgaggctcgtgagtttgtaggtgattcctgggtgtggggggctgactccagctgaaatctggggttgtttggggagtagctgggagacacgggagactccccgagagctgcgggtgagctgctgggtgatggcagtaagaacatgtggtatattattgatgaacgtggtgattctaaagaatccccagaggaggacgcgggagaacccaatggcttcattgattgcccatcacggtgaggaaagggaaatgggagcttgtgggattctggtgatgacagaggtgagtgtggtgaagccctggagggtggtgaattgtagctccggatccctggtgaggagcttcctcttaagtctgagtttctgagaggagagagggagaagctgggtgaggctagcatggatcttggggagtccgggctgggggacggttcataagaagagccagacaagaccctactgttcttaggtgcagacatgattaggaaacctgcagctcccaaggacccctaccaatttcctaacccgcagaatgaaggagtgtgtgtgtgtgtgtgtgtgtgtgtgtgtgtgtgtgtgtggtgtgaggtatgtgctccttgagaaaatggaaataaaccaaccaatgagacagacagacagacagagattcacttacccaagtgttctgtcctgtcctctgaatccgcttccaagtcgcaagacgctgtaagctccaagtccacgcagagcccgcaaaacgctccggccgctgctccgctctgtgaagatctgagtacaggcccgccagggtgggtttaaatagcctcgggcgggcgcagcctggcagcggaaagggcggagcttcactcctcctttccatcagtcacccccaactttcccaggctacaccgcgtaggaaactgctctcctgatttgatttcatgcgccacatttgggacaatctaagaacttacgagtttttttggccaaatatattacgaattacatgcactgaaacactgaaaaccatctagtggttctgtggttctcacattgtggttttgacaccagcagcatccttgcaaccctcaaaccccggagatccacagatctgtgttgtaacaagccctccccctgaccctgatgcatggcagtttaagaattacccgtgtaagtgaaaagacttttaagaaagagtggagatatgcgttgtataaacattcttttgctctggaaccacgtagagacttgagagccagttgggtggagcattcattggatgagggtgcttggcttaggaatatcaaaggtgtggctccagataattcaatcatctaattaagttttcagttatgctaatctgttgtaaaattccgtttgtgtaaattcttttactcagactgagaatggcaatgcctcaacctcaatttccagggagggttgagagcctcaggttgagttgatcaccaatcgcctatggtttcacccatcatgcctatagaatgaggtctccataaaaacccaaaaggactgggtttagagagcttctggataaaacttcccggaaggtagtgcacccctccccacatgccgggcccaaaatctgttttctgaattttttgcaatatccgctatcatacaatggtaaatggaagtgtttccctgcgtgctgtgagctcttccagcaaattcatgcaactaaatcagggagtggtggaaacctgatttatagctatttggtgagaagcgaggtaaaaaaaacatagggcttcccattgttattagagtgggaggccagtctgcggaactgagccctgtggaatctaatgctatgtccaggtagatagtgacataatggaattagaagacacccagctggtgtccacagcagaatggattgtgtgcttgactgactgaaagaaatccccagacatgtcctcacagaaatcttctgtgctgattgttgtgatgtgagaacggaggaaaaacagtttttgtttttttcactcagcctaaaatgtaaacgtgtccagtttctcacgctattgaggatcacgtgatttataataaaaatgtttaatatttgtcaaatttatgtataaaaaggatgttggttttcattttattgctaacaatcaaggtggtcatcgttgatgccttttcatcatttttcttttcactgcgttatgtctttcaccc[184 bp omitted]ccgggcgtggtggcaggtgcctgtagtcccagctactggggaggc[144 bp omitted]aactccattctcacctcacatgctgtgagccagggagtagggactttgaggattataaagcatatgagcaaatgtaagttgttaaattacactcaacaaatttgaagtttgaacgctctatgtatatttgataaaattagagatttagtgttaattattttaggtgtaatagcagcatttattacatttctgatcgtgtttctgggcaattgcagttccagattcagctgcacttttcctctaggtcttcattccctgaagaggttgatatgggcatctggtctcattcctgatgcattcctcagatcagagtagttgtcagggtgagggatgagaaaggcatttgtgtgagagagctgtgtggactttggcagatagggaaaaaacaagagtcttgaggtgccatgtgtcccatgcctttggctccccgccttttccaccctgctgtctgccctgaaaggccgccattgccttctggccttgcttgtctttggccaatgggaagtctcaacaggaaagtttggagagaggaagaagtgtgagttggagtatcttgtcccccagttctctctctgcaggattgtcacagattagctgcccttctaaacaacaggtcatagtttaggcggccctggccacacagtcctcttagttccaggctccagggactgctccctccccttacctcttaaggcccaggtgttataatggcacctccctgtcacttcccaggacagagccttatccactgtgacttccttacccccagccaacaccattgtaagccgtctgtttattaaactcccctcaaatttcaatgtgccatctggttcgtgccacggccctgacttgatacaggcaggtagtgtctgaagccagaaattcaggaaaccaaacccccaaccatatatatgtgagtgcatgtgtgtagatgtgtgcttcaaaataaacctgtcccattattggctcttcagtgagaacaggtactggaagtagagggtgagtttatgtctttgcacgtgcatctaatgtataatatccaagccaattctatttgtgcatttgttaatattgagaaacattgattgagtgcttgttaaatgataagatccttaccaagtacagtggataaaagactacagcttggttattttttttttttttaggatttgtagttttttgacaggggaaaggaggagtgttttcttggtaggttttaactattgtaaaatgatgtaattcatgctgtactaatgagttgaacactccttattttggcctttgttggagcccaaaataagaagtgattaatgatgtctcttaaaggtaggaaaggagagaaaaagagtccaaggatttaccaaaaagacatttcatattctattaacctgattctataaccctgtgagctgcaattcaaagggtagcccacagaccagtgccaataaatgatattggtctgtgaccagataatttgagaacttgagtgtagatgtttaaaattttgtcttattgattaacataataataacaatcaggctttaatttgcttaccttcttaattttctttttccagtaatttcttgttactgtatcttaccaaaatatcagtctgtgacagactgaaagtaaccgtaataataatttaaaaactagtcctttatcacagttagtgtgagaagcactatctgagaagacagaaactggttttggccttttattttttaatcttcggagtttccacagtgcctaaagtggcaattttatacagtaagtttctccacgaaggccagaggcaattgtgtttacagagtttatcagatggaatcccaagaaaaaataaacagaacactcaaattgggtaatttgagaagagcttaataaagggacagtctataaagtcgtaggcaggctgtggtaatcaacaaaggatactgcaatatttcagagctagtgatagcagggtaaattactggctttaggactgaagggctaagggaggaggcagtcactaaaacctgaagaaagatttatgggatgacagctgcctgatggaggccatgacctttggtcaatggatatggaatatagccattccacagcaacctctagggaaaaacctgggggaataaatattctgacttcactcttgtcccttccctggatctcttgctggctttccccattggctgaacccaactggaagctaattggcaagggaatccactgatataagcagaacaggaaggggctttagtgtatatgaagtggcaagcttagaaggtctctgtctacccactttggtctacctgcagtctgaggatatttatagctcagtatactgtgagcatttgcagagcagagaatgtgtcttatatgtcataggtgtgtcatcaatacttgcaaaagcaggggatagaatgggtgctggagagagagtttaggaagacaagagtcaaggtgtagatgtttaaaaatttgtattattgattaacataataataaaaatcgggatttaatttgtatgtcttggctaactacaagtccttcagaccacaggcctggccatacaagattaagtcttgcaaatgaaagtggaaatagcagaaggtcgctgtcatcctgagattgctctcttttttttttttttttgagacaaagtgtctctctgttgcccaggctggagtgtagtgatgcaatcacggctcactgcagcctccgcctcccaggtgcaagtgattgtcctgtctcagcctcctgggtagctgggattacaggtgcccgccaccatgcccagctaattttgtatttttagtagagacagggtttcaccatgttgtccaggctggtctcaaattcctggcctcaagtgatccacccgtctggggttcccaaagtgctgggatcacaggtgtgagccactgtgcctagccctgagattgctctcttaatcagcaattccagagcctcttttccagcggaattcagatgtagactatgtcagttcattcacaagtctgagaaatggaaaacaatgtgcaggttttgacccaaaagcttgaggagagagacaggagttacacagtggtctgagattgagggactgggttcgaatcgagggaagtcttgaggaggtgggagttcagtctgttcagagtgagaagagatgatatctagggagaggagaaagtgtgagaaacttgtacagataaggaaggaaccaatgttcattcacaacttgttggatccatgatctcatggattctttcttctttgcagttctgcttttccagaattctgccctttccaaaaggaagacggtatgattaagttccaggtaagttaagggtttctttcactttaaatatactgttcattctgaggaacgagacacttctgttttctgaaagaaggtcagcattttttgagtgactactatgtattaggtactttatctgctcataatgactttgtgaggcaggtgatatgactccctttatagaagtgaagaaacaaactcacagatttcaagatgtctactttggtgctactctaagtgtagttcatgtatcagtaccagtccatgaactccttgtcactgccccatgagggaaaaagaatcaaaagtaagttcagaaacttttatagcaatttggtgttgccgcagcatccgagtgcatgggcagcatatacatgaccatactctaaatgtcactggtctacttcgataagtagcaagatttgaatgggtatgtattggtcagagttcaaccagcaagacagaccaataggagatatattttaaaagatttattgtaaggaattggcttatatgattatgggggctaactaggcaagtccaaaatccatagggcagcccctcaggaagggtgggctggaactcctggacacagactgaagctactgtctgtgggtggaatttctccccctcccagggaagcctcagttctgctcataagacctttcagtttattgaatcagacatactcagattagttagaataatctcccttaaagtcaactgattatggactttaatcacatctacaaattatcttcatagcaatacctagattagtgtttgattcaataactgaggactgtagcttagccaaattgacacattaaaaagaccatcacagtgtggcagaaggattttcttttaatcatgaaaaatttaatgatgaaaatacacaaaaaagggcaaagggtcttatgatcctccatttgcagtacccatcatgcagtttcaacaattaactttttgccaaagagatttgcttaatctctgtttcagtatttttctttcccaaagtatttgaaagaggcatggtattttacactgtattggtttttctctgagcatatcacttttgtatagtaccttattatatatgcaactaaaatgaatgagctcacacttttatccttctgcctggaaaccatcttgcccaagtccaagattcattaggtacattttctatcttctaaattacagcaacagttcaccaaatgttcaccactgcatcacccaggtcaccatttttccagcctcctgtaacagtgtcctcaatggttttggcctggacctaaagccaatgccatgaatatttggtagcactctgctggttttggttagcttgggtatgtcctcatagcaaagacagaggggcaagagagcaagtgggcatgtgagatttctcaaggcccaggcttagaactggcacattatcacttttgcttcattttggtagccagagcaggttacattgccaagtcaaaactaaagaggtaaggaaacacactctggtcctttagtgagattggagagcatggaagaggatatttctaaatagcaatctaatttaacacactctctatgtatttcagtatatatttccttaaaaatggactaatgagataatcaataattatttggtattatctaatacccagacaataatcaaatttccctgattatctcaaaaaaattttgacagttgctttgttcaaatgggatcttaaaaaggtctatactatcatatagttggttgttgtatctcataatgtcttttaatctagagaaatctgcccatctactttattctctcctgctgttgacttgtcgtagaaaccaagtttggtgtcctgtgttctttcctacatttggaatgcatttgtttgcttccttttggtgtctttcagtgtgttactctatccacagtattttttgtaagtggaagcaccagatgcttgaatagattcaggttcaaggttttacaagaatatttcatagatggttttacaagaatacttcacaaaggaaaagatttaaagatgttttgcatgtatttattggtttataaatttggtttcttaatatttgggggctgtccttgtacctgcatcctatggcattccctgcctaggattcctaccaccccaagtaggcttcagggtatctgtatttcctgaatgattaattccaattcaattttgttgcctcccacagaagaaggatacagtagtgttactgacagagcagtgctattaggacaactgtgctgactcccctagattttgtttttaatcattgtcagattttggtaattggacaattgttagtaacatattctttttgaagtcctttataactgcttacaactttcgtttgaaagctctgctttatttagagatgcagaatctattgagagaacatatctgtaaatactcgactctgagcagtgtgacatatgcagtgatagaaatattttatgtaaaaattggtgtcttgattaggagatggttattaatatcagattattccccgcatccttttattttaagaaatttcaatttatcgagaaaatgaaagaatagcataatgtgtaatcttcacctagattcaccaattgttaacaatcaccacaaacatatgcataatatgtgtatatacacacacatatctatattttattttgatgacccagttgggataaattgcagacatcattataattcatccctaaatatgtcagtttatatctcctaagaataagagcattttcctacatttccacattactgctaacatactcaggaaatttcacattgataccattattttttaatagttgatatccaaatgttctaaattatcctaataatctccctcttcccttttctgttttttgaatctaggagccaatgctttaagttaccctgtcttcttactttcctttaacatgataaaaatagattaatctgccatgaaaaagtgaaaataccaaaccttggtgtgtgatgggaaatgaactcatgaaacactactggacttatgtatcagcacaacaccttagtatagatttatctgcgcctgtgtcctgggccatattttataatttgattaatattgtcctttgggaatccctgattcaataggattagtatccttatgaaaagagactcaacagagcttgctctcattctccctctgccatgtaaggacacagtgagaggacagctgtctacaagccaagagaagaaacctgaatgaaacctatcttggtggtacttgatcttagactttccaatctccagaactgtgagaaataagtttcttttgtttgtttaatctaacccagactatggtattttattaaggcagcccaaacagactaagaccagtcatttgtgtggatgattgatgtggcatgtggttgatgttttaggaaagggtgatattcaaggacgtggctgttgtcctcaccaaggaagagctggcactattggataaagcccagataaacctgtaccaagatgtgatgttggaaaacttcaggaacctcatgtcagtgagtgagtaactgagcatcagaccactggacctgtttcctcaaatcatcatttcaagccagatagaatattccagttagaccacaaagagaaactttgaccactggagagaaaaatcctaagagctgcatgcacaagttaggaccctgcagttaatgagcttttacagatcattgtgaggatgtggctccttgtgatgggtttgtgagggagctctccccaaatcttccacccctggcctgtgggcattcattgcaggaagtaagcccttcctcccctactcacatatttaggctctcattctttcctcatatttctcagaatgagactgataaaattcacacaccaccaaggaccttgatctatttgttgcttctggagaaaagtcaatgtttatccaatgttctggataaaccagtgttaatggaatcatgggagaactttgattttgttggaagttacaacagccaacacttatgggtatatagtaagtgtaatctaagtgttggcttatttgattactttttgataaatatccaacctcattttcatttctcaaagtttcatgtacagttaggtattacctaagtttagtttataagatagtgatatggtttggctgtgtccctaccaaagtctcatcttgaactgtagttcccataattcccataggttgtgggaggggcctggtaggaggtaactgaatcatggaggggggtctttctcgtgctgttctcatgatagtgaataagtctcatgagatctgatggttttataaatgggtgttctgcacaagatttctctttgcctgccaccatgtaaaacgtccctttgctcttcctttgccttccaccatgattgtgaggcctccccagccatatggaactgtaagtcaattaagcctctttcatttataaattacccaatctcaggtatgtctttattagcaacgtgagaacagactaatacagatagttgatgttattatcccccttttatggatgtattactctgttttcacactgctgataaagacatatccaagactgggcaatttacaaaatatgaaggtttaacggacttacagttccacgtggctggagatgactcacaatgatagcggaggtgaaaggcacgtctcacatggtggcagacaagagaagagagcttgtgcagggaaactcccctttctaaaaccatcagatctcatgagactcattcactgtcatgagaacaacacaggaaagacccacccccataattcagtcacttcccactgggttccacccatgacacatgggaattgtgggagttacaattcaagatgagatttgggtggagacacagccaaaccatatcatccgccccagaccctcccaaatctcatgccctcacatttcaaaaccaatcatgcctcccaacagtcccccaaagttttaactcagttcagcattaactcaaaagtccacagtccagtgtctcaactgagacaagccaagtctcttccacctatgaacctgtaaaatcaaaagcaaggtagttacttcctagctacagtgcaggtacaggcattgtgtaaatacagctgttccaaatgggagaaattggccaaaacaaatgggctacaggccccatgcaagtctgaaatccagcagggcagtcaaatcttaaagctcaaaaatgatctcctttgactccatgtcttgcatcctgatcacgctgatgttgggtttccatggtcttgggcggctccgcccctgtggctctgcagagtataacctcccttctggctgctttcatgggctgctgttgagtgtctgtggcttttccaggcacatggtgcaagctgtcggtggatctagcattctggggtctgaaggacagtggccctcttctcacagctccactaggcagtgccctggtaggcactgtgtgtgggggctctgacatgtgggaattatgagacacaacatataggaattatgggagttacaattcgagaagagatttgggtagggacacagccaagccatatcaatggatgaaacaactgagtcacagaattaataacttgcccacaatcacacagcttataagaagaactaggatttgaaccctcctaatctggtcctaggtcctgtgattttaataaataacctcatgaaaccaaagcgtaaactgtagacacaggaccttttgcataaatctgcatatctctgcagttgtttctcaaactgcaggataaaaccctcttggtgagtcctgaaatcaaattactgtgtcataactagcaatttttaaaaagcaaaatagattaatagaacagaaaacaaaagaatttatcaaagtacattgcacacagtatgtaactatcagctgagcaagttttagtgagcagtctgtgttgatgtttgtgcctattcctactgagtcacaatgctgattttactgtgggttacaatcaaaacaattgggaaaccactgcttaaaccctattcagggcagctcgtggtctccctttccctgatactatcttataaactaaagtcactttcaataaaacaacccagaaaggaccttgaaccagaagcagtatccagtgggacttgaccatgatattcatgccattttgaaacccatcttaggatcccaagaatatgatcgtcctcttctgcctcagccccctgtttgttatataccacagtcttgcttccctgggtgccaggccattgacagtgccacagtatctgttccccattttcatagtcatggctgtttgagattctgcaacaacttaaaagggcagaacttaaggaaatggattgtaggatctgagtggtctctatcttttcatgaagacaaagaaccttggggaaaataaaaaggatgtctcttaaagcttgtctcagaggtttacatacgcatccccgcacaacgccaggaccatatttcacaatgtttaccccatttcaatccccattgcctttttatccccatcccctttaggctcaccatgtacagttgtgcaggttgtacacaaacatacatgatagtcctccatatgacagtgatgtgaaggaagggaagccatcaggagataggacttgttgcttgtttctgaaacctcttgtgaccctttgtgtcccttactctgcccaacatataaaaaacactccatcaatatgtattatttatatacacacacacactacataaaatgggagcctttcccataccttttgtagcaagattattaaaggctttttatcgactactcttatagcagggaggtgaatttcttccttcataaatttttcctaagatttccttttttttcttttttgcagagtaggggtggaaaggtcttgctctgtcacccaggctggaatgcagtggcacaatcttggctcactgcaacctctgcctcccaggattaagcaatcctccaacctcagatttccaagtggctgggatcataggcaaaactgagccaatttttaatttttttgtagagatgggatctcatcatattgcccagcctggtcttgatctcctgggcttgagtgatcctcccacctcagcctctcaaagtgttgctattacaggcatgagccactgcacctggccaagatttcttttaatttccctacaacacttgatttccaattggcagctcacaggttagaattaccgtggctctaattgtttcatatgtcaatagaagccagggacaacttcccaccccatcatatttcgttttctcaaaacctctggacagatgattgacttggtctcttagccacattctctttcttctcataagagatgggattaaaaacaacattttgaatcttcaggaaaaggggttgaattaccttttacaagaagtgcttcattgctggcagatttcgaaacaaaggatccaggatttaactgggagtcaggattatatcatgaaccttcaagaagagtgttccccacatttaaaaatgtttccctctgtgaagagtgagcaggcaagtctcttcagatttctgaaaatgaaaactatgtagcaaatgtcattatcaaaaatcaggatatcacagcatggcaaagcctgacacaggttcttaccccagaatcgtggaggaaagccaacataatgaccgagccccagaactctcagggaagatataagggaatttacatggaagagaaattgtacagacgtgctcagcatgatgacagcctcaactggacctcacatgatcatcatgagtcccaagaatgtaaaggagaggaccctggtagacatcccaactgcaggaaaaactttggtatgaaatcaacagttgaacaacataatgcagtccatgtattaccacagcctttcacatgtaataactgtggggtgccctttgcagatgatacagatcctcatgtccatcacagcactcacctaggagaaaaatcttataaatgtgaccagtatggaaagaactttagtcagagccaagatcttatcgttcattgtaaaactcactctggcgagactccctatgaattccacgaatggcctatgggctgcaaacagagctcagaccttcccagatatcagaaagtcccttcaggaaacaaaccctacaaatgtaaagaatgtggcaagggcttcaggtgcaactccttcctttataaccatcatggagtccacacaagggagatgccctacaaatgtgatgcatgtgggaaagggtttggatttaggtcacttctttgtattcatcagggagtacacacagggaaaagccctataaaagtgaagagtgtgggaagggctttgatcagagctccaaccttcttgtccatcagagagtccacgctggagagaagccctacaaatgcagtgagtgtggcaagtgctttagttcaagctccgttcttcaagtccactggaggtttcacacaggggagaaaccttataggtgtgatgagtgtggaaagggcttcagccaaagtacacaccttcacattcaccagagagtccacacaggggagaaaccatacaaatgcaatgtgtgtggaaaggattttgtgtatagctctgttcttcacactcatctgagttcacactcgagaaaaaccatataaatgcaaagtgtgtggaaagtgctttagttacagttcatattttcacttacatcaaagagatcacaccagagagaaaccatataaatgtgatgagtgtggtaaagacttcagtcggaattcagatcttcgtgttcacctcagagtccacacaggagagaggccctataagtgtaaggcatgtggtaagggcttcagtcgtaattcatacctccttgcccatcagagagtgcatatagatgagacacagtacacacattgtgagcgtggcaaggaccttctgactcatcaaagactacataagcagagagaaacattataaaggtagtaagtcagggttcaattaggaaaacagaagccacactgtattccagatgatagaggctaactcagcctttgggagggctgggggagcaaaagacagggacgctgccatcgatgaggtcagcatgacaggctgggggttcgcgctggcacaggcgccggcagccacatcggcaggcaggagggtcccgctgcacagctgaggggtgatgattgcctgggtggtgatgtcggccattagacgcgcctcttctgccggcaagtgtgtggcagtatgaagtagaaggacaagcctgtatttgaggctggaatgcggaaggggctcttctgcggctaggtgtgggaccctgagcaggaatgtggagaaatgggcaggtaaatgcatcacgttggccaggagatttgcaaggacttacagctgaatgatgataatggggagtgactgtgaggccctgggagtctctgagtgtaaaggaagataggtgtggggcccccagggagtatgtgggagccattgctgtgtaggtggaggtagttggggaataatctggtgagctctgtgaatttctagggttctcctgaatgctgaggggtgactcttgcagaaaactgaggatgcttggagaatagctgggagacacagatgaggccctaaggaatggtggtatagaggtgacagagataagggaggagcacagtgaggtctatgagtttctgggtgactcctgtgtgttcagggctgacccaaggagaaatctggggatggttggagaggagctgggagacacaggagagtccctgagggttgcaggtgaagagatgggagacgtgatagaagagggccctgagatttttgtctataggtgatacttgggtttgggaagctgaatgttgcagtaagctggggattgagagaatctgggagacacaggagagtacctgagggcctggagtaaagagttgggagacatggggccagagccctgtgaggtccctgagtttctgcttgttacatgggtgtcagggcctgactgttacagaaatctaggaatgattggagagtaattgggagacatgagactccctgagggctggtggtgaagagatgggagacataggggaggatcccgtgaggtctatgagtgtctctgtaattcctgggtgtggcaggcagactgtcactgaatatgaagaatgttcatggcttatatattttttatttttactttattttctaggtctcatcatagctcatatataacactcaaaacatcattaaaccatctaatctaatattcgaccatatcatttctttctttacacgacttgtgagataagtaagatatcagttaaaattttcatttcagcatctgtttttctcatatcccctttgtgcttcttaaagatggttaaaataggacagacagacttggaactttgttcaactgtcttaggaaaagaccattgcaggggcacagtctttcaaccccactggccatgtaagactaggcctggagcctggaacacatccttcccaagagatactgaacctctttcagactcattgagggttcttcaaagtgtgggtcagtggtccccaagggatgcccgcagctttcagtatttcacactccatgaaaacatcagcaactgttttcccagacctgacactgccaggtgtgcaacaatctctggattaatcctcatagagatggctccacttagggtcatctcatagggatagaattttgctaaggataaccccatcagttaccctttaagttttctttcctatcccaagggtattaacctctattatctggtctctcagttcaactttcagcttattacctttctgggatcagaggcttcaatatatggtcatccacaggattcaaattcatgattcaagggaaaggtcagaaagacatgttaatcaaatcttaaatatcaaagagtaactaaaactttgcctcatgaaagcatttttgcaagcataatttagacggtcagcactgagccagggaagcacccttctattcagaggactctcacatcagggaacatatcccagaggaaagagacaatgctacatgaggggaagaactaaaacatgaaaatagagttccttaatattgctttgcatatatgaaaataagcccacttgccctctatacttcccacgcattctcagttcttcatatgaaaccatttctggccaaaatttctagttacctatttccaggaatccattttattttcaatgaggaatgttcctaggaatctatgtcctaagtagtaatctgctcatgctattccaaacataaacctcattatcctgagggatctttgctatttggttgcttagtctttcctaaatagtcaaagaaggaaatctttgtatttcatttttggctttgaataatttttactcattatatcatttatcatagcataacagcgtacattccaaaaaggaaggcccaacataaactgagaaattgaatagatacatccataatccctttctattctaatccatacacaaatattttatcataatggttttagaagtgaatattatttctatattcttttcccacacttttcactatatatcatagacactttcctaaaatttataaaatcttcacatgtaacaacagcaagtgctgtaaggaacagattacaagctatctaattggaagatcatgtagtaaaatgatgcactaaaatatggttttccagcctaagttctaaacactacagcaacctttaaattttctcaataagcccactagtgttagcattccatttactctttatggaaaaagaggtctaacactggcagttggctttggcatatgattttctctgattcaggtctgagtgctttctgcaaggaaaagtgccagtatttattattttcataggaatatgtcataagaatcaagtttaacattgtatatggaattgccaggttgaaaagtcgttcatagactttccccctttcttttccagaacaaatttgagacacacaattaacagagggctggaagttttcccacatatattgtttttatagtagttcttccaactacatgtactaccttaaaataaattttttaaaagaatgaaataaaaaggaagaaatcccagctgatttacaaactagttacattcatagagtttctcttcagtatgagttgcctgatgcctaataagtttatagctattaatgaaagcttttccacactgaatacatgtaaagggtttctctccagtatgagttctttgatgcacaataagtcgagcactcaagctaaatgtttttccacactgattacattcaaatggtttctctccagtatgagttctctgatgttgagtaaggcatgaactctgtctgaaggacttcccacattgactgcattcatagggcttttctccagtatgagttctctgatgtacaacaagaacataactctggctgaaggatttcccacactgattacattcatacggtttttccccagtgtgaattctctgatgcataacaaggtgagaactgcggttaaaagattttccacattcactacattcatacggtttctctccagtgtgagttctttgatgtgcaacaagctgagagctccagctgaaggatttcccacactgattacattcaaagggtttttctcctgtgtgagttctctgatgagcaacaagtttataactttgactaaaggatttcccacactgattgcattcatagggtttttccccagtatgaattctttgatgtgcaataagtttatagctctggataaatgatttcccacattgattacattcatagggcttctctccggtatgtgttctttgatgtgcaataagtttatagctctgcctgaatgactttccacactgattgcattcataaggcttctccccagtatgagttctttgatgcacaacaaggacataactctggctaaaggatttcccacattgattacacctgtaaggtttctctccagtatgagttctctgatgggaaacaaggtgcgagctccggctgaaggattttccacattcactacattcataaggtttctcccctgtgtgagttctctgatgtgcaacaagatgcgagctccagctgaaggatttcccacactgattacattcaaaaggtttctcttcagaattatttctcatgttttgagtaagggaggaactatgagaggtttcactacatttatattgactctcttcaaaaggaattctctgttgttcattatgggatattttggggttcaaaacctgcccacattctttaaaatcaaaggtttttcctcctccatgaattttttcatgtatatgtaggggtgtaccatggcaaaaagattgaatacggtcactaaatccataggatttatcttttgtttgagttcttgtaaactgaataaggtgaatgctctgagggggttttccacattcattattttcatatagtgtctcattctcattaatcttctgatgactgtttacagcagcattaagatgccattttttagcatgtgatacatgtttatgaaaatggtttcttatgggtataactggggatgaaaatagactggaattcagaccactcttctccccagtttcatcacttttgcagactctctcatgaataactgctttcctttgagtgaatgccacttcctgcaaaagtatctcttgtttttcctgttgcttctccaactggtctttacaatcatccacttcttcacatgaagataaccaaggatcatcccttgtaaacctttctatcttcactccattagctggttcttcatcaaaaatcctctgctttgaagttgaatctttttttccaactgcagttgccaagtctgaaagaaagcaatataagacatcttagtcaaaaaatattagagatggaaaaatggaataaagctaacaagaaagtatgaaaaatatatatgaatttgttttcaaatactgaccgataacctaggttgaaaaagcaaaagggtgagataaagtattaagtacagaactaccacagcccaatattacaacagagcattaaaatggaactattgtaatcttggtttaatcttagtctgaataaataagactctggatgtcaaatacctgcatattccaaaataagatcatctacatagaacctacagaattgcaacccaattttgcaatatgtatagagagtcttttccactctttagtgctacacagatgttcactaagagattagtgtctacatatccaggaatttctgaaggcataaaacttgctaaatactctactctgtgtcagtgaggcatgaggaaactatgtttgtgaacaaaagaaaaggaatggggcattattatccagttccctaactaccttaggaaccaataaagccccacaaatttctgtgattccaactgagagagactagaagtttgctcctagtagcctgggtggctactaggtcaagcaatagagagtatatatggaaaaagtagtcatgtatacagtccaccaggaggtgggaaatgaagaaaaaatgtggcatcttctatgcggattttttcaaatggaccttctacacctgtaatgacccctatgtgtctggttctcacttgaacacatgtattggaaaattctttttatattctttcccttgctccaactaggagattgtatctgcttcaaaaagctgacaaggaaagatacaggaatttgagttttcaaagctggggacaaaagaaaattactgcagaatctggtcctggcctttggtctttaggaacatgaagactgaaaatctcaagcccaagaatctgcactatttctaccctacaaactaaaattaatcttcactggggaataaagagcacaaacacaatctagatgcagccaaaatcattctggctgctgaatttcacagttcttaatcgatcagaatgtgaaatcatttcagtagatggatcttcattaaagaggagtgtattcttaccccaagagactaggtccctgtggttctccaggatcacatctctgtccagggtcctctgagcagggttgcaagtaccctgttcctcccgtgtgaagtccacagtcacaattttgaagttcactccttcctaaaaaaggacacacattcctgctcagctgggcatcatttccttccaaagttcatggaggaggaaaagtctgacagatggaaaaaggaaaattggtgacctgggagttgtccttaaattgtcagtgcccaaaagattccagtcaagatgtacaggtgccttctgggtgagctctttgggttttggatgctggacctgtttttacaactccaaagaggaataccagataagaactgatataaactattttattttgtctgccttaaaaaggatgcttattctgacttttgcactggtgaatatagaattcccacttaggaattccctctaaattcccaagaaattaatgaaacaggggtggttgatttttttctgtcaaaggccagatagtaaatatttcacactttgccagccatacagtctctatcacactactcaactctgctgctatagcaagaaattagccacagaaaatatataaacaaatgggtgtggctacattacaatagatctttatttacaaaaacagccacaggctgtactttgctaatgcatgagacagaaaatgaaatgtggacctcgatgaaaagcagtatgtataggtgaagaacactggatgtagaagatacaaagacttggctttctcacctataaagggcatatatctgcttaagaaatacatctaatctgacaatctgtcctttttttttcttttgagacaagacctcactctgttgcccaggctggagtacagtggcacaatcatggctcactgcagcctccatcttctgggctcaagtgatcctcccacctagtctcccaagtagctgggactacaggtgtgcatcaccgtgcttggctaatttttaaaattttgtagagacagaccctcaatatattgcttaggctggtctcagactcctgtgttcaaggaatcttcccatctcagactcccacagtgctggaattacagggatgagccaccacacctgacccaattgtctttccctggcgagtttattccatttctatttattaggcctaataatacctaaatcattgggttgaatgaataattacgatgatctatgaaaagccactagcagagtttactgatgaaacaacgaaggccagcaattacaggctgagtatcccatagctaaaatacttaggactggaagaattttggatttcagattttgaaatatttgcatttacatgagatgccttgaagatgggatccaagtctaaacacaaattcatttatgtttcatatacaccttaaacatatagcctaatggtaattttatgcaatttttaaaaaaattttgtgtatgaaacagttttgactgttttgactatgagtggtcgcatgaggtcaagtgtagaattttccacttgtggcattatgctggggctccaaaaccttccaattttggacaatttcagatttttggattaggggtgcttagcctgtactgttatgattagtaggtctcaggatcctcaaagattaactgagagccaaagtgacctttattctgaactctcagtcttcaaataacagttctgtttctatccatatccagctgcatggcagagccttttaggagacgtttgctgttattactgccatataaatggggtctcttgggctgcctcctctaagcaggaaagggcctgttcttaagataactgggcaggaattttaatccaaaagagaagtgctaagggtgatctgtccttacccaggcacagcaaaggcaaggggaagtcgaatgcctcttgccactaaaggctctttaaatagaccaggcattcttgagctgcagttcatgaataggatacagggtcctgaatgccatgaaagcacatgcaaaatactgctgtatatgcctctaagtttgagcctaaaaatttcactgaaacctcaaatgttttcatgattagcccaacgtgaaattcaaaaaataactcgccaactgctgcctgtatttaacattaatctttaaggtattgtctttcaatctgtaatgcatgcttctttttaataaacactccccctttctgtgtaatataggtctctttagtataaagcttgttcaaatgtcaaacagataatactaaactagattagcacccccactccactcccaactatatattctcaaagttccatggacttctataatcacactttcttatttgcagaatggtcatctctgtcactaggccatgatccatgaaggcagggacaagtatttacagtttgcaaatgtaactccaatgcttagcatagtgtttatatatagtagatattacatttatatttcacaaattatttcagtaagtgaatgaacactatcaataaaccttataagatatcaaaataaccctcacccaaattgatttaagtcatcccccctcacctgaatctcacaagctgtaccacatacccatttgaaaaggcccctcaatgtgcagatactagcttttctggacttctatcccacttattctattcttctcacttgtcccaaattcctcatgcctgaaaactccttcccaaaatcttcaactgcccttgaaactcatcttttgtaacaataaaataggatgggtagggcggctcatgcctataatcccagcactttgggagactgaggtgggtggatcatttcagcccaggaattcaagaccagcctgggcaacatggtgaaaccctgtctctactaaaaacacaaaaaattagccaggtgtgctggtgcatgcctatagtcccagctactcaggaggctgaggtttggagaatcacctgagcctcggaattcaaggctgcagtgagccatgatcacaccattgcagtccagcctgggtaactggagtgagaccctgtctcaaaatcataataacaataaaatattgcagtttcagtatccttcaccaaacattccctatacatccctgtgttaatggagacttatacttcctgctgatgacttccctcctcctcagtcctcagaggctaagaatgctcatactctcccatcctagatctcagcatcaaagaaggagtgcatgtcctcccagttactctgaaactcatgccatttacctcacttcttggagctctgtcctacccacctcctgaacaccacccccaccccattcactgaagattcatacttgggatttatcctctaatataagaacttgtagtgtcttatctcatattgtctatagcatccacttgtatagtcagctgatgagaatataaaaataactgactttaatgaagcacttatgagtttgcatgaagcaccaccatggtgccaggcattgtgctaacatgtcatatggattattcatttaattctcaaagggctcctgtgagaaaacactattagcagtattatttttttcttatgaagaccaagggagtcagagaaattaagacatatgcctaaggttagtagtagagggataaaacctcaagcttgcacattgatgactgtgttctcagtcatcagttcatatggctaacccaagtctcatattctgaagctgctcttcatcagctcattcttcgggggacaccccagaccttgaaattgtcataaaacactccaccttttgaatcacaaatacaaaactgcccacgtttcactacaatgtcagattgctccactgtattggctcagttttttccctttactcttgttccttgaaagtttaaggccattatgctaccgaaatgtctactattaccactaccagcctatattctttttcatttctacttagtgggctctttatcacttccatattaattactcaatttaaggttcatggatcattctttttaatctttctacttgacgtatttttaaattctctttcaagtattcccttgacctttggagtgtccactccataggaagtggacctggcaaattacaaaaactaaatgaatctgaatgtcaatctgctatctgtggaaagtgggctacaaattgccactgcagggaaaaatccacaaaagcagcaggatagagtattataaattaatggccactatctctgaatgaaactttcagattgaccagcaatcctattacatttactggagcagcctgtttcctctcataatccaaaattgctattttaagccttctctacccttgtcatacatctctccattccaattcccaccatcatgctcatctgatttttcgcagtgaaagatcaagctttcaaataattccctcaacctcactgttcctatataaatccttctcctcatatagagctaatttattcaagatgttctgaattaatttctctggtgctaaccaaggactgtgctttatagtttctctcttgttgcctgatgaataactttttttcctctactaactccttcctgtaatcatttaaactgaattgaatattttcaatccctttaaaaaaaaccctcaatctcaaaagtccttgaagttttcactttcttctaccttccacacaataaccaaacttcttgaaaaagttgtccacttttgtctccatttcctcactttctttctttctttttttttttttttttgagatggagtctcactctgtcgcccaggctgaagtgcagtggcgcaatctcggctcactgcaagctctgcctcccaggttcacaccattctcctgcctcagcctcccgagtagctgagactacaggcacccgccaccaca[131 bp omitted]cctatttcctcactttctactcacttcccagccatgcacatttctcagtgtaaagacagaggccttgcccaacctacctgagatgggatggtcagagacccagtgtcttctccctcgactttgatgataatctcttgaggaaggaaagaatcctgaaaaggcaaaacagatgagaaaaaggaaaataatcagggagctaagtggcagctcaaatctcctccggtcagtgggctaagatttgacataccacctattttaacgcatccctcccaccatatttctcctccctcctcctagtggtaagctccgctaaccatgtggagagagagaggagatacatggaggagcaccaaggcccacagatacctggacatgaggtctttttgggtcttctgggccagcccattgcagctaaatgcagctgactgagtgatccaagacactaaggagcactaagacgctaagaactgtccagcgggacctgccaaaattcctgggtcacaaaattataagcaaataaaatggaatacagcataaccaatgccagaatcataaagaaaaagatcaacaaattaatttcataagatgtttagcaggccgggtgcggtggcttacacctgtaatcccaatactttggaaggctgaggcaggcagttcacttgaggtcaggagtttgagaccagcctggccaacatggtgaaaccccgtctctactaaatatacaaaaactggccgggcatggtgacacgcacctgtagtcccagctacttgggaggctgaggcaggagaatcacttgaacacaggaggtggaggttgcagtgatccaagatcatgccactgtactccagcctaggcaacagagcaagactccatctcaaaaaaaaaaaaaaaaaaaaaaaagtctagcaaaaggtgccacatgatcaataagaatctatactattaagacttcttccaaatcagtaaaaggtagcctcaactgacaaagaaaaatgcacatgcaactatgaagaaactgctgtgaatatacaaacagatgctcgcctctttacatcaaaatcaaacatctgtttctttatctgtatatattagagaccataagttcacatggatacctccaattacaattcaataacacattttattctgtctagcttttctcctttctttatgtatactttctttctctggctcccattttcctctttatatttacttatttgctcaagccctgtacataaccaacatcctgaccacgtcgggtgtttttgtgacagtcacagtcattagtctgttgctaatgactccagctctggcagcccactggccaagagcttcatatattcttagaagaagtataaattgatacaaccctcctgtattggctatatattaaatatctgtatttacaaatactgctttattttgaaatccttaaagattcacaagaagtagcaaaaatagagccacactcagctttccctggtaatatcatatataatgacagtacattgtcaaaaccaggaaattgaaattttggtacaatattattaattcatgtacagagtttattccatttttatgtacattcttttatttttgtttttttaaaggcaatatttttaaaagtgtaatgtaacatccattaagtctacttgtaagtacttatccttaggaaataacataaagtacatcaggatgcatatacaagaaacctcattagcaagttacattatcatagcaagatgggaagggagactaaatgtccactaggaagtgcctggttaaataaattatgctttattcagatgactgaatattatttagcagccaagagaagaaataaatttgcatgtaccgatacatataaataatagaaagatgtctataatatattgctgagtgaaaaaatgaagaacattatacagaagatgaatagatttctataaaatataaatatgcacggaaaaatctggaaagatgttctcaaaagcattaaaaggagttattctttgaaggggtagaactgaggagcaggttcactgtctctcttttaatgctgcatccatgtttttcaaaaccacttattttaattaaatatttggaaaccaggaaaggtgcttccctctttaaaaatcaccttgaaacaacgcaattcctttgtagtgtcctcaggttttttcctacaggatacaataattcagtctgttaaatgatagcccattcaaggatactttgctcctcctcaaatcaaacactgaaaagcaactactgctaatttttgataactcatttctttagaagccattggatcaaaaactaaaagaaaataaaagtggccaggtgcagcagttcatacctgtaatcacagtgctttgggaggctgaggtggaaggatcacttgagcccaggagttcgagcccagcctcagcaacacagtgaggctcccctgtctatacaaaatatataaaataggccgggcatggtggctcacacctgtaattctagcactttgggaggccgaggtgggcagattgcctgaactcaggagttcgagaccagcctggtcaacatggcgaaaccccatctctactaaaaatacaaaaaaatacaaattagctaggtgtggtatacctgtagtcccagctacttgggaggctaaggcatgagaatcacctgaaccggaagttggagtttgcagcaagctgagaccatgccacttcactccagcctgggcaagagagtgagactccatctcaaaaaataataaataaataaataaataaataagccaggcacggtggtatgtgcctacagtcccagctacttgggaggcaaagatgggaggatcacttgatgtggagaggtcaaggtataagtgtgtcaattttttctccttatctatctagaaaatattttactattacagtaggaatggttattaaaaatggctagcattaatgtatttaaaggtaggaaaggattctccaaacctaaaaacaccactgtatatttactgggtaggttgtgaggttcacaataagtatcaaagagccagagctgctgcaatgtaaagaaggcccaatgtgaaagccaagaggttgtgttgcttgcattactaccacacatactacaacagttaaactgcctttttattttttgtagaagacagggtctcgtcatgttgcccagactggtctcaaactgctggtctcagcgccatgacagttttgtcaggaagttaccctctatggtctaaaaaggagaggaaccctcagttctgggaattgcccaccccagtcctggaaaactcatgaataatccaccccttgtttagcagaaaatcaagaaataaccataaaaatgggcaaccagaagcccctggggctgctctgcttatggagtagccattccttattcttttacttttttgtttgtttgtttgttttggttttggttttgagacagagtctcgcgctgtccccaggctggagtgcagtggcatgatctcaactcactgcaacctccacctccggggttcaagtgactctcctgcctcagcctcctaagtagctgggactacaggcgcacatcaccacgcccagctaatttttgtattttttgtagagatggggtttcacc[139 bp omitted]ccctctccctctccctctccccacggtctccctctccctctctttccacggtctccctctccttctctttccacggtctccctctccctctctttccacggtctccctctccttctctttccacggtctccctctccctctctttccacggtctccctctccctctccctctctttccacggtctccctctccctctctttccacggtctccctctccctctctttccacggtctccctctgatgccgagccgaagctggactgtactgctgccatctcggctcactgcaacctccctgcctgattctcctgcctcagcctgccgagtgcccgcgattgcaggcgtgcgccgccacgcctgactggttttcgtatttttttggtggagacggggtttcgctgtgttggccgggctggtctccagctcctaacctgagtgatccgccagcctcggcctcccaaggtgctgggattgcagacggagtctcgttcactcagtgctcaatggtgcccaggctggagtgcagtggcgtgatctcggctcgctacaacctccacctcccagctgcctgccttggcctcccaaagtgccaagattgcagcctctgcccagctgccaccccgtctgggaagtgaggagcgtctctgcctggctgcccattgtctgggatgtgaggagcccctctgcctggctgcccagtctggaaagtgaggagcgtctctgcccggcggccatcccatctaggaagtgaggagcacctctgcccggccgcaaccccgtctgggaggtgaggagcatctctgcccggtcgccccatctgagaagtgaggagaccctctgcctggcaaccgccccgtctgagaagtgaggagcccctccgcccggcagccgccccgtctgagaagtgaggagcccctccgcccggcagccaccctgtctgggaagtgagtagcgtctccgcccggcagccaccccgtccgggagggaggtgggggtcagcccccgcccggccagccgccccgtccgggagggaggtgggggggccagcctcccgcccggccagccgccccgtccgggagggaggtgggggggccagccccccgccgggccagccgccccgtctgggaggtgaggggcgcctctgcccggccaccaccccgtctgggaggtgtacccaacagctcattgagaacgggccatgatgacaatggcggttttgtggaatagaaaagggggaaaggtggggaaaagattgagaaatcggatggttgctgtgtctgtgtagaaagaagtagacatgggagacttttcattttgttctgtactaagaaaaattcttctgccttgggatcctgttgatctatgatcttacccccaaccctgtgctctctgaaacatgtgctgtgtccactcagggttaaatggattaagggcggtgcaagatgtgctttgttaaacagatgcttgaaggcagcatgctcgttaagagtcgtcaccactccctaatctcaagtacccagggacacaaacgctgtggaaggccgcagggtcctctgcctaggaaaaccagagacctttgttcacttgtttatctgctgaccttccctccactattgtcctatgaccctgccaaatccccctctgcgagaaacacccaagaatgatcaataaaaaaaaaagaaaaaaagaaaaaaaaaagaaaaatttagaaatgggaaaaaataaataaataaataaataaacttgaccgaaagaaaagaaagaaaagaagagaagagatgagaagagaagaacaagaaagaaagagagagaaagagagagagagagaaagaaagagagaaaagaaaaagaaagaaagagagagagaaagacaggaaagaaagagggaaaagaaagaaagaaaagaaagaaagaaagaaagaaaaagcaagaaagaaagaaaagaaaagaaagaaaaagacaggaaagaaagagggaagggaagggaaagagggaaaggaagggaaagaaagagggaagggaagggaaagagcgaaaggaagggaaagaaagagggaagggaagggaagggaaagaaagggaaaaaggaaataggagaagggagggagggagggagggagggagggaggatggaaggaaaaagagaaaacaaagagaaaagacaatacaaaaaaaactactgttcttaagcagtcctcttgcctcagcctcccaaagtgggattacaggcgtgagtcaccacaactggcctaaactgccttgaaattgctgcatgaacattacaaaatagcccaaaatgccagaaaacaaaaataaaactcacaatgccaaaaaatagccacaaccaaactacagatggtacaagggagccacaagttttgaccccaaactgttaatggattcaatcttatctggcctgaaagaaaaattacattcctgatatacacccgtgacaaatacatcttttcttaaaaaaatgcctgggaaatgagaaaagttactcaagaaaggaaaatttgtaaatgctaacctgtattttaagttattacaaactccttcagataatatcacactctgttaattaaaaaaaaaaagctaatatcagttaagaaataataccaagaattggacaacttaatgtttttctcagcaggtacttggcagaaacaaaattccaaaatgtcactatctgccataactgctaaaactattatacttgcagaatatggttgcacctcctcttgaatgcaaactgtttttagcacctttttgtttaaaagttttcacaagaaaacaaaagaaagctcatctttcctcaaggtagactctggatgaaatgtccttccttgccctgaccccagcagtcaactctatcactttaccctgctttcatatcttcacatcacatatattcttctacctttggctttttatttaactcttccactagagtgagtttcataagagctgagatcttgtctgtcctgtttaccgtgactccaccatgcttagatcactactgacacatagcaggctcttcataaatgtatgctgactataaacagccactaggagaagggacatggaatgtgctacctgtaactttgcatttgtccctggggtccctggaggcactaaagcaaagctgagctcaagcccctcccttggttagaggaaacctttgttgggtgccttttctttgcagaaaattcaaagtgtcagtatccagaacctgctcccaacttactcttacaaactaaatgctcagaaacaagcttgcaacaaatgcatgtgagcccgtgcatgcatgcacacccacacaccctgaatttttccccaggttctactcactttggattactgaccattttaggaatatctcctgaatttacatcttagctccctcagtttccttcagataatgtcaatgtaatctatcatttgcctagtatttttagtaatacatagagtacttcaacacagaatttccatctcacaaaatcatctaaactttttttttaagagctagggtctcattttgttgcctaagctggagtgcagtggcaccatcatagcctactatagtcttgaactcctgggctcaagctatcctactgtctcagcctcccaagaagctgggactacagaggcacgccaccacagctggctaatttttttgtttttattttttgtagaggtgggagtttcactatgttgctcaggctggtcttgaactcctggcctcaagtgatcctcccatgctggtcccccaaagtgctgggattacaggtgtgagccactttacctggcctaaacttttttttgaagaaaagagtaatatgtctattctatttcaccaatgcagaaattaatggtaataaggtttagtaagctcatttaagtccactgattgcctgacacaaactcttctgcttcccactgtcttaccaaagtctgtctaatcacccaaggcccagatcaaatgccacctcctccatgaagcgttcccagatagcagaaagcttcatctcttcttctctcaggacttcttagctttggtggccctttactataccagtaaaattattctcttcatattactaccatttctatatacctctcccctgggtcctgggttctatattagaaagcactgtgtattttttatctttgtattctcctcagtattgagtaggagcacaataaaagttctctgcatttgacaagactagagacacgtgcagagtttgggacataggaatagaattaaaaacttttactctactttctgtatgctctggagcatctttaaattaccctcttgttcaacagtcacctctctaggtcataaaggagcatttccctttttctttgcagactttacgaaatgggaacaggaattagactgttgacttgcacagagaaaagggttgtgggcaggagataataattgttccttctgtaatgtatgtgggaccccatgggaaccaaagcagggggaaagagacaagcagagctatcatggagtgacctgtccgcttcatagtaagacagtggtcaaatcagacctagggctagggctatttgctcacctataaatagagatgaccaaatattcctttcccaatctgaggtattcttggggcaataaaatgaagtttctaatcaaatcacagaaatattactggactcaattctcagagctttgctttgggggtctactggcaggaaaccctctatatctgtgagaacatttagaaaacacaggcgtcacacaggcagacttcttggtgtgtttccatctcttcctgccctgggagctggaaggtggagctcacatttcagctcaagggatatggcgtccacagggcccatgtgggaggccctgaggtttcttaatcaccaaatctagaaggcgtaaaaccaatattcacaaactacagcactggaaagaaggttcccttccctgattttctcagaaatcatcctgacaagaggatccctttagtcctcacgcacaagaaaattccctctcctgccccaccttatcatccatgaataattctcactgtcctgaaatacacagaatagaccatccacatagggccaccaacaacctgcacaacttcgaatgttgagaatgacagtggatgggtgagattctaccacctacttggcagcagttttggtctcagtccctgaaggcaggtagggctcagagttggctcaaggccttcgctggaccagctgctacttcctgtgtatgagccactaaaatctctaaggtgatgccccaatacccagatggtttcttcctagatcagctcactggactcgtggccttcgttcaaagcaaagactttggctcccttgatttttctctcccttccagggttctaatatccttcaggtccaaatcaagtacttgttcatcttctgataataattaaaattaactagaggacattcagagttgagaagtgtggtagccagactctgagatggctcccaaagacccttactacctagtattcatgcctttgtgtagtccttgaccaatggtaccaaggtgggtctgtgtgaccaacagaatatggaagaagtgatggtgtgtcacttctgaaatcagatgataaaagacattgtggcttcatcttgattgtgtgcaactaagtgctcttgctctctctctctctctcactgggatcacctgctctggcagaaatccactgctatgctgtgaacgccctggaaagaggcctctctggtgtacagcacctcttgccaacagccatctgagtgagtttgcaacaatatcctcccacctagtcaagccttcagaagtcagcagcccagacaacaacttgcctgcaacctcatcagggaccctgagcaccagaaacaaccagttaagctgacctggattcctgaccctcagaaattgtgtgacgaaataaacattggctattttaagctgcaaaattttggggtatgtaataacagataactaatacaacaaacaggatgtttttgctttccctatgtagccttggaaagtataagaagcgcgtttctggttgtgagaactaagtcgtgcagggcagtgctgtctgtctcatctttccccacagtgctttgcacagggccttacactggttaggcagtcaataaatatgtgacaaaagtcatataatgaacagacttctaattcagctcacaaaaaagaaaatggtaaaaggaccattaagagtcccagaaaacacctagtgcctcgcttaaattagaacaccaatgaccacatcaaaacacattctaccagccaggcactgcggctcaccccgtaatcccggcactttgggaggccaaggtgggaggatggcatgatcccaggagttcgagaccagcctgagcaacacagcgagaccctgtctctacaaaaagtaaaaaataaaaaaattagctgggcgtggtggtgtgcacctgtagtcccaaatactcaggaggttgaggtgggaggatcacttgagcgcagaaattccaggctgcagtgatctatgctggtgtgccatgtactccagactgggtgacagagtgagaccctgtctcttaaaaaacaacaaaataacaaaaccccacacattttacctgtagttttgataaagatataaatgtaaacttatatttgcttaactctttctaaaacaattgcacatgtatacatggaatcccatacaaaacatttatatcaatgctatttgtaacagcaaaaaaatgtaacactaaagagccattaacaataaacccataaaacctgtaacatatttagaaggtgaaatgtgggcactaggtatgcgtagtggtattaggatgtcactgctcccagccctccgcggacagacagggaatctgtgtgcacacatacgcacaccgatacaagcacacatctctatatatttctagattaatgtgtactgaaaaccatgagcccacaataaaacctccaattcccactgcacaccagagtccactcaaatgttctttcttgccgtatctgtacctccctgatttgatggcaaggcgcctggctccagtcccttatatatacacttacttatctgatctagccccctgtaggtagttcctctcccatttccacaatgacgccctctccctatggatgctttcccagactccctgggctctgccaccccacactcggccaccctctgcccaggggagctcctcaccctgcttaggctttgactccccgggctaggctgccccatctctcagactcactcctctgccacttggacttggacagcccacgtcaggccaccccactgtgtcagtaccctccacatgccgctgggctctgacacccctgcaggccaccctcacgcatgatgccctcaacatgctcatgctctgacatgccacaccaggctgcacctgacccccaacacaggtgcacatctcaccccactctggctccaacaccccatctaccatggacacctgctcactgcacttgggctccaactacccacaatgaagcaccccctctctggatgccttgctcacctgctctgaccccatcaccccacaccagatctccatatatggacactggcctcagccacttgggctctgacacccacattgggctgcaccacgtgcacaagcgacttcttcattccacttgggctctgactatgctgggatgtcatcctgtgcagatgcactcctcaccctgcttggtcactgacaccctgcacatggacactctcttcacagcaggcagtcctgacaactgtaggtgccccctaacactgccccacctcacggcttcaaggctgacttgttcaggaagagaaaggagaagctctaatttaacagttttaagaaattaagagttttcaaagaatatttgcggtgggaaatgttctaaattgttaacttgttttttagagacagagtctcactctgttgtccaggctgcagtgcagtgacacaatcatagcttactacatcctagacctcctgggctcaggcgatcctcccacctcacccactcaagtatctgggactataggtggacaccactatcctggctaatttttaaaattttttatagagacagggtctcactatgttgcccaggctggtcctgtactcctggcctcaagcaatcctcccacctcggcctcccaaagtactgggattataggtgtgaaccactgtgcttggccaattgtcaatatttttaccttaaagtgtactgtacaaaaatatgaaaatacaagccaggtgtggtagcttatatctgtaatcctagcactttgggaagttgaggtgggaggatggcttgaagccaggagttcgagaccagcctggaaaacatagtgagatatcgtttctacaaaaaatttttaaaatacacacacacaaaaaatataagccaggcttggtggtgcccacctgtagtcccacctattcaggcggctgaggcaggaggatggcttgagcccagaagtttgaggc[137 bp omitted]acagataatgtttgttaactgattgctatatttatagtcttctaacatattttctatatacccaaaaactatatctctttttaaaaagtgatgatttctaagtgcaatttacttaacataggtaataaataactttttctgtcattaaatttgcattatcatcagtttcaatggctacagtgtattctatttcatggtcttatcgtaattcattcagctatcctcttacattgcacatttagtatatttccaattgttcattctcaaagctgtgaattgctggccaaaagggaatcagcattttaagggcttttgattcaggatgccaaattccttccagaaagagttatctgggctaaaaaggtgaggcaactagcagggagattcataaaatatatagtaagtgttagaagcctgatggccatgagggcctcaaaccccctaaaaggctgcaaagagagtcagggaggagccacagcctcccaagctgagagggtcaggctgcagacagacccaagctctgggtctccactcacctgtgcacagaccttcgggggctctgggggcttctcatcctgctcttccatgctctcctccaggcacagcagggtgctgaggtcctgagctgcactgagagaagccccaagtacagcatgaagatgtaggtctgccggaaccgctgggccccccacccccattagcccctgctcccaggatgcaggatgcattcccatagcaaatgcacttctggaggttcctgccagcttcctgcccaaatacctgtgtatgtactgagagtccctcagtccctctcccaggtcaagtttctgcagctccaacctggttcctccaccatcttgggcccctggaccatctacctgtaagcccagcttgtgcccaacatggccttctgcccaccaccaaagtctgcagcaccagtccatccctctcctattcactgggccctgggatccccacaaatatcaggcatattgaggaccccctggtgttcaccccatcctacccctaccaacctcaatctacagccccaaaccagcacttcttcctagggccagaatcacactcactgcctaactgcatgaagctggtgacacagctccactgctcccaggaactgattcaacaactaagactgatcctaccgttccatcagccagacctgtccctccagcaactcagcacagagggccacccacatcctgctcaaatagccaagcatttatgcacagagctcagctatacccacatcctgttccctccacacttctggggtccactggctcctactcgaacagcaccagccagattcccaccctaacaccctcccaggccctgaatttgtagctctaaaccagtccctccaccaacttgggtatactcaggcctgaaactacaacaaggcctgcatagggctgggggcctccaacagacaccagcacaagccagacaaaagcagccctacccaggctctaaatacatgtctcagaagctcaggtgcctctgtaccaactaggtgttttgggatccaagactagagggcaaatcctaccctaggcaccccaccctctgcactccatctctcccacttactctctcccctgctcccaccatattctcacgcagcatagcgtaggttcacaatgcagctgtttcctgaaattgcacccaaactgtttcctccaccttactccacagccccctgcttgagccacacctgcccagattctgaccaaacatctttcgggggcacctgtggctcaggaagatcctgtctttccaccaaactgggcaccatcaggctgtgatcagggttccaatcacacaaagaccccagcaccctctgtctaaaactcatctccggcctcctgtttcccaaccaaacaccggtgtgtgtgcacaaggggtgcctgacacagtcccgcccctctgcagctgctcccccccacacacctgggcatcctcaggcagaatcagggtcctaggactgcccatgcctccccaatctgcccaaatgccagcacacgtgcagagtgttgctggagcagccccgtgcctcctaagaccagatccaaactggagcccccaggcctctattccacagccactgcacacgggccacccacctagactccctcctactgatacagccacagagcaggttcgtgctcacaatctgcatccaggacctggctcctctgcccgtctgggggcacaccatgctcctgagtcaacaatctacatccctcaccctgtgtctcaacctgcctgggacatctcaggtacccacagcctctgtgtaggttctggggtcaactgccccactatttgcccgcagccaggacactacaacaactaaacagtagcttgagcatacagctccataatcagccccaggacttgggcactcgccagcgtgggggttctcgagcctacgatacagcagctcaatgggaactgggccctttgtccttctcttgcccaatcatgacggcctgggtgttgtgcagtcagctcttcccgggaccaaatctgcagcacaggctctgtccctctactaacctgcacattctcacgcctgcaaatagcgtacccaagtaaaggtctcagcaacacctgcttcataacgatgctggcaacatactgcttcctccccagctaccaatttgatggcagctgttgcagctctgtccttcctggacttaaattctgtatctccaacccggagtctctgcccatcttgaatgctctagagctctgcactatcctacataggtccctactatcagttcaagtttctgttttccattcagacacccccaggacgtgcagggggccctctgcccagaacctgtttctaggccctgataccctccttcagcctgggagtttgctgcccatgggtaattcccaccaagggttcactagcaacactgcctcttctggcacaagaatctgcaactccaatctggtctctccaccaaccacagcgcccccagaccttggagaagcgcgttgtctgctctaggggcccagagccacctgctcggaatcttacctacaaccttttgcttcctacccaaatacctgatcaagagtaaagggacagtggcacagcccctcctctccagaaaccacaatctgcaatggagcactccatcaacccggacatcctcaggcctccactaaataagcccggcattggaggaggggagttctcaagatgtccccttacatcaatgcatgtgccctgtgttccagcaacctgggcatcctcaggccccagacaagagcaccacctgaccaagcacccgcgcatgcacgcagaggacagtcgcggaatatacagctgtatcagtaactccatcaaccccggtgacccgaggctaaagcgccacccgcacagataccaggtctccccgctacactcaccaccgcttccagcttcccgcgtagaccctgcgcatgcgcgcatcggacaccaagcgctgccccacgcccctaccaacctgggcgtccgctggcccgcagcccaggctgggcctgtcaccgcctcagtgcctagcacggctctgcggcaggacgaactcgggttaggcaaccccctgccccgattctgcaacacggccgactcgggttaagctagttcggtcccctctcctagtcagcatccgcaaggccgctgggggttaagtctgaagggccgagctgctcggcgacagcaagcgtccgcgcgcgggacaatggctgctcttgtggccgaacccggaagtgcacttgggctcggagagccagaactacaattcccagaagcctccgcggcgcggacggtcagtaggcggggttccggcttctccaaggaagtggggcgggggaccgggccagaagctaagagggcgtcctcgtccggggcccgggggggcgccacacctgtgcatgtgcaggtctagggggagcactaagaccagccgcggcgccgggaggccgaggccagtgcagcgacgcatggggagtcgctctggcgtgacgtcagaatccaatagaaatggcggggaccctttctgggtgccccctgcctgtcagacgctgcgcgcgaccccttgtctcctctagtcctaggggaaacctgtgagacagttgcgacatccccattttacagtggagggagcgtctaccgaacccttcaggaatctatgtttttacatttaataatactaaaatataatcattttatttttaaattttgagttctttctctgcctataaggcctgaaggatctgttccccccacctctccccttttctctgtttttgttttgttttgttttgttgttttgagacggaatttcgctcttgtcgcccaggctggagggcaatagcgcgatctcggctcactgcaacctccacctcccggattcaagcgattctcctgcctc[212 bp omitted]ttccccattctccaacagatccagcagactccagcccctggtcgtttgcaggtgctctttgcactccctagcagcctctcctgagggattcatttggctctcaccgtctggtaattaggggaatatcatcttctcatgaggcattgccccaccacccgttgtgaacttgcaagcaaacgcttccctccccacatgctctgtgcctcccccttcatcttttatttttttctctaaagaacttttcactatctagcacactatatattttaattatttatttggtctactgtccgacctaccactacgatgtcaattccataaggaaaagcattttatcgatgttgatcactgctgcatccccaacacctaaaaaaaaaaaaaagagagagacctggcacataatagatgctcaataaatattcgttggctaaataaaggttcctgtctctgtattaaacactttaatatttcattaccaagcccaatcagcctatgaggtagttgtgttaattttcatcctaccagggaggtagctgaaaattggagccctgctgtatgaaaatacataattttttagtttttaaaatgcttgtcaaagcactcctgtagttttcttcacgtaaattctgacctttaaaaacaatgaattattactatttgaaatgtaatctctatccccaaagcttcttattattggttattgtggttgatcttttaaaaaatacttattttgtatctggttaacctactgcaatgttattaattcttacaatactccagttgactctcttggcttttctattgagacagttatctacaatttcatcttttccttaccagtattttaaattagacattctctttcatgttggattatattggctaccatttccaaaaaagtattactaaaagaggcattcttgtttgtgttcttttaatggacatatctctgaagtttgagggttaaatgtgacatcggtttctacattgaagtaagtagcttatttttttaaccttttattttgtaaatttcaaaacaaaagtagggactcaattaatgactccccaagacctatgtcatccaacttaaatattttcactcagtcttgtttcatctgtatttccacctatgttgtgcatttgagaccaagatgttgaactctagagtccatgctcttaacttttacattatgttgccgcttgtctacacatcagtatctttcctctacgtgcaagcaatactaagtttgcaaacaaaacagaaaaagttcgtatgtattcacaaaaaagcaaaaaaaaaaagccttataagtaaatttagtaagataaatatgtcatctgaagaaaccctcaaaaccttactgagagagaaaaatggacaaatagaaatgctgtgttgctagctgtgtgttgtaaagatgtaaaatcttgcagattgatctgcaaatacaaatatgacaaaatcagaatgggatgctttgagtgttaggtcgtcttccttttttcacttcatttatttttctgctaattgtttaagatattcagaaaataggccaggcgcagtggctcacacctgtaatcctagtactttgggaggctaaggcaggccaatcatgaggtcaagagttcaagaccagtctggccaacatggcaaaactctgtgtctacttaaaaaatacaaaaattagacaggcatggtgatgcacgcctgtaatcccagctactcaggagtctgaggcagaagaatcgcttgaacctgggaggcagaggctgcaatgagccaagatcacgttgctacactccatcctgggcaacagagcaagactccatctcaaaaaaaaaaaacaattttcagaaaataaagcgttagtactatgtaatgtaaaactgactttgtttatctgtcttttgtttagtcttttttattttctttcacaatgaacaaggtggtaatgtttacttccaggaacctataaatcctgacttaacctgaatattacagggactttagaagagttaccactgctgggcgcagtggctcacgcctgtaatccccacactttgggaagccggagcaggaggatcacttgagcccaggagtttgagaccagcctgggcaacatggtgaaaccccgtctctacaaaaaatacaaaaattagctgggcctggtggcacaagctgtagtcccagctactcaggaggctgaggcaggaaggattgcctgagcccaggaagcagaggttgcagtgaaccaagattatgctactacactccagcctcagcgacagagccagaccctgtctcaaaataaataaatgaataaataaaaattttaaagagttaccactcaggaacattctagaaagatgcctatctaatctagagatttatctgtcaactgtcgggaagagctgagaccaaagtttatattaagattctgtttattggccatgaattggataagggctcaagatacagtgaagagcaagaagattatgaatccatttactataaatactagaaaacaaagtaagagtaacgagagggtaaaagggcatgatctgtctctaggatgtcagggggagggggacatttcttggcagggaagaggaaagttctcagggttcaaatagggtggtgtttctggtactactgagtgcaacccttaagatcctaattccggtctcttgtatcacatctaatgattaatttttaaaatctgaattaatgttatcatcattatgatagccattcagctccaaggatagcaacaacgcattctgaaaactcttcatttccaggagttttcagtgttggtttccccctgtgttaacagtccttttttgtctcctttgcttgatctctcctgtaaacatcagaggaacccaggaatcagctgtcagcctgtcccttgccttgtcttcatccactctgcttggggttgacataacaggcctattgctcaaactctgtaagttccccagaaggtcctgttttcctgactagcctttgggcagctctgggaactgagctctcataatgttctatctggtaagagtgcttttgtttgcctgaggccttgagccatgctgtaccactttgtccagatggtttatactaacagtgtaatttatggaggaacatctgctttccttctaggagtctggagcttcagtgactgaccctttataaaaaccatggacacccaggtttaggtgagcttccctcgatggcaatgcttcacacacgttgtcacacatcattgctgggggatttcccatgtgctgtggtttggatatttgtctcctccaaaactcatgttgaaacttaatccccagtgtggcaatattgagaggtgggggtttttaagaggtgattggctcatgagggttttgccttcatgaatggattaatccattcatggactaatggattaacgggttatcatgggagtggaactggtagcttcataagaaaagaaagagaaacatgagctaacatgttaccacactcagtccccttggcatgtgattccctgcaccacttcaggactccacagagagtccccaccagcaagaagtgctctcaccagatgcaacccctagaccttagacttctaagcctccataactgtaagaaataaatttcctttttaaaacaaattacccagatttagatattctgttataggccaaagaaagcagactaatacaccatgtgactccactgaaagagaacacttggaagctggtgcagggtatcctccagacttcaccccatgcaccttttccctttgctaattttattctccatccttttgctgtaataaactataaccatgagtataacaattgggtcctatgaattcctctagaaaatctttgagcatgaggtggtcttggggacccccctgacagaggagctcatccagccccataactttaagtcccactgacaactctcaaatgtgtatctccagccatgatctgtctagatttttatgaacaattgcctacttgattctgcaactgattcttgacatgtctaaattcttgacatgaagcaaattctttatttctctccttatcccaaagtttctcagaaagtgacctgccaatcatccagttgccctggcaagaaaccatggagatatccttgtctcctaactctctttaccttcagcaaatctcattctgactctctccgcccctgcagttctcaggattctaagcatttcatgcctacctctcctcaggagcctcaatccctcacttcactacgtgttttctccttttattaagagctcttaatttcttaagagctccttgttccttatcttctatcatgatttgaaaagccacttcttctctgacacctgtctttgtcccctactcctctctggctgactcagactcactcttctctctggagtccaccaacagtgtttgctcatcctcagcctgcaactatgatatcctaagctgttcagtctcaaaccttggtcctctaactctagatccacgggctgtcatttttacccttactattgctttgaaaaaaaatatgagtcaaaatctaagattctatggaagccagggcctgaccaacccattgcagtagaacatcacaaggtctacagagatgacagagaatgactggcttataatatgcacttaataaatgtcattaaatatatgatcaagcatggtttctctaggactcctggagaaaagatctctgcttccattagacggaggggttgatttggatgtaagtgttgggctctggattcacaagctcctgttaaacaaagagaaaatgtgagctccatttgctaggtggaccctcccagtctactcactgtagtctggggcccaaacagcctggagctttcctttctttggaaattccaaaaatcttcctccattctcatcacactttagtaaccctggcacatctctgttcctggaatggcccatgtacttccccactgtggtaaacagactctaaagtggtccccataatccctgcctcctggtattcattcctttatgtaatctcctccccttgagggcaagacctgtgacttgcatctaaccaatagaatatggcaaaggtggcaggatatacatgattgcatgtatgtgattctgttacataagattatgacttctgtcttggcttgaagaagcaagatgcaatgttgtgagctgcctgtggagagggccacatggcaaagaactgaggatgacctccagctgacagtaagaaactgaggccctcattatgacagcctgcaaggaactgaatgctgctaatgaccacatgagcttggaagtggatccatccccagctgagcctcagatgagacctgggctttgactggcaccttgattatacagccttgcagaagagctaactaagcaatgcctgaactcctgacccacagaaactgtgagataatgaattcatgttgttttaagctgcaaagtctgtggtaattcattatacagcaactgataactctacaccctcttcagggccttttttactgatgcctctcaagttggaatgtttcctttcatactgtttgcatggtttgctccttctaatccctccagaatgtagcagacactgagttcactgagttgactgacctaaccttcttccccacaccacctcccttgcttgcttctattgaagaggctgggaatgttaatgtaccactttctcagcctctgttgctacaaggagcaccatatgaccttattctggctaatgagatataagaggaagcttactaggtggtatttctgggaagaccttttgcccgactaataataggaaacaaacatggctcccctacgcagacactggtgaagagagggacttaggtggctaagtttttaccagttcaaagctgattagagagctgacaaaactaaacatgatccataccatggcctgaatcaatctgattcttctatggagaatttgaacctagaaatgcttaaagggcagcagaagatgttgttatatatactctgaagttatagagaagcaatgaccaggacatttacatagaaattcaatctggattgagaagaatgagatgaattcatagattagtgaaaatgagaaactgtataataagagagaaacagcttcttgatagcattcaagtcgccaagaggcccaggagtaatttctgaaattgagttatctgatatttctcagtgttctctcaattaatccccattcgaactacattcaaagggtttaactttcttaacattaaaaattcttgactaagatattaatatatgaaacattcagccaggtgcagtggcttgcgtctgtaatcccaatactctgggaggccaaggtgggatgatcgcttgagcccaggaatctgaggctgcagttggccatgatcgcactactgcacacaacctgggtgaaagagcaatacgttgtctcaaaaaactaaaaaggtgtataggatattcacatttttcaagaatagttatctgtctgttaggctaaaatctacccttcttttacctatcctccatggtaatttatgtgccctctggaacaacaaggaacacatttatccctctacttgaagcctgtcagacactaaaatattggagttctctgtccctaaactttctcttttccaaacccaagaaaaccctgtcagtaggacatggatttgagcccctgttctggcctctctcttattcctcctctggataaattctgactggtcactggcttgttcagaatatagaatctgaagtccattcttggaattggagtaatctggctgtcctgatgacagggttgagatcacttgcattctctaaaataattctactagtccttagaactatggagccatcacttgactgctctaaacttgttactggaattttgcttatgcctggatgaactaatagttttcttcttttttatttttttctttctgagacaaggtcttgttctgttgcccaggctggagtgcagtagctcgacctcagctcactgcaacctccgcctcccaggttcaagtgattcttctgcctcagcctcccaagtagctgggattacaggtgcctgccaccatgcccagctaatttttgtattttcagtagagacagcgtttcaccatga[138 bp omitted]tgttttattgttaccaggaagcttagagacacataagagatatagtggcagatatcacgtaggcccagtatatatttttactttttacccatatattgacttcttgctattgttaaaaatattttttctgattgtaatttctatttctaatttaacaccattttgtagtgttgtatataaactgcttcaaatcttccatgggaaaaactgcttcaaatctcccatgagaaaaatgtggggaagtaaatatcatgaatgaaatgaaagattggaaaggaaaggaaatgaatgaaaaggaatagactatttaggaatgtaactgaaagagatggcaaaggcataaatgaaatggagggaaattgaataggacagaaaggaatacaataaaaattaaaggcagagaatggagtgaaataaaatggcatgatgtccaaagaagtgcaaatgaaagaaattaaatgaaaaggaaaattgtaacagaaagaaagaaataaagtaaaataaaatggagcagaaaagagagtaataaaataaggtaatgaggggagagaagtggagaggaaattagagaaaagtaatatagtagaaggaaagtataacattaaagaataaaaataaagcaacgaaattaaaaaaaaaacagaaaaggggggaaatggaatgccatggaatataaaataatgaaatgaaatgaaactgaaatcaatggtataaagagtaggaaatgcaaaggactggaaagaaatggaaagaacttaaatgaaatgaaaaggagtggaatggaatgacttgaaaagaagaaattaaatggaaagcttgaaaaggaaagtaataaagacaagggaatgaagtgccataaagggcatgaagggagaggatgaagtgagaaaacatgcagtagaatggaatggaatagaatagagtggggtggattggaaagaaatgaaaagggaaaggaattgaagagaacagagggagaggaatggaaaacagtgaaatagaattgaatgaaagggaagggtatggagaagagaaagtgaatggaaaagaaagaagggaatgggaaaaaagaaaaattgaatggaaaagaaatataaagaataagaactggaatgtagtggaatgaagtgaaaaccaatcaaatggaaatgaatgtaaatagggacattgcctaggaaggaatggagaggtaggaaatagaacggatgaaatggattaaatatatggatggaaataagaagactgaaatgggatgggaagaataagaatggaaacgaaataaagtcgtgggatgggaattgagtgggctggaataaaacagagtgtaatggaatgtaaaataaatgaattgaaaggaattaaaagaaaaaataaaaatggataaaatgcaatagaaagaaaggaaaagaatgaaaaggaatgaaataagaaagagatggaaaggagtgtaaagggatcaaacaaagctgagtggaatggaatgaaaaggcatggaatgagccaggcagggtggctcattcctgtaatctcagcactttgggaggccaaggcgggcagatcaattgaggtcaggaattcaagaccagcctggccaacatggtgaaatcccgtctctaccaaaaaatacaaaaattagctgggtgtgatggctcgtgcctgcagtcctagctactcgggaagctgaagtgggagaatcccttgaacctgggaggcagaggttgcagtcatcagagattgagtcactgcactccagtctgggtgatggagcaagaccctgtctcaaaaaaaaaaagaaagatgaaaggaaggaaggaaggaaagaaagaaagaaagaaagaaagaaagaaagaaagaaagaaagaaagaaagaaagaaagaaaaaggaaggaaggaagaaagaaagagaagaaagaaaataaaaggcatggaatacagtagagtgaatgggaagagctgggatggggggaaatagagtggaaggaaataaaacccaatgggatggaaagaaaatggcagagtgaagtgatatagaaatacagaaaatgaataaagctaaatggatagaaaggaattgggtggagtgaaacatggaatgcaataaaatggagtgcgttggaaaggaatgaagtaaaaccaactagaaaatgacatgatggaaatggataggatggaattgagaagatttttaaagggaaatttttcttcatagttcatcctacagactctttagtagggaagaaaaagcagattggtgacagatttccacctgtccaaagactcagtgtggcataaacatacctcatagattgactccatgttttttggcacagtggagaccaatctgagtgggggcatcagaggtttgggtggtggcttccaggggctgaaagaattgcctctacggcttgctgaaggcagcttcgtctgcaagtaagcagagaaattaggcagggcccacagacacagattgccaggaatgtaccaacttacactcttcagggaccgagagagtggaaggaatctgttcaggttcttgcagagaatcagaggtggaagcagggttagaacccaggcccttgccctggcccagaactctcctttttcctgctggatctgcaacctctactcccagcctccttttcaccccagcatgtgctggtccagtaccacctcattggcaatccaattccaagccctggaggtggaaggaacgaaagaggatccagggtcatggcatctgacccagctctctgtgaggccttaggctactctcttcccatccctggccctgtgatgtgccatgaaatgtttagacaagatgatctctcaggcttatcacatataaaattttcagattgtctttccttcatagattctttaaccaaacccagcagggccaatgtacctcataggtctcctctggaaggtctggtggttgcatctggggaaaaacaaagttgcagagaggtcatagggcttggaataggggctaccccaagagatgctcagaaatagctttggcctcagaggcaattatagcacttctgattcccagagggctcaaagctaggaattgtcatgtcaaagaataagaagacgaggagaagagatgaaaaaacccgggagggtcttgagatcctcagagaagtcagaggaggagatgcagagagacttaacctggcactgggttttctcaaaagatcatgccagcccccaccctaagaagtaagactatagcagcctggtcaggggatcaaggagggttccctctgcagcatcactcaccagttcgactctgatccgtccctgaagctgggatatattgcgatactcaggactcaggctttctagaaaaagtgaatctcagtcaggagctggagttcgaaagagatatggggcaaggggctgtttttccaggacccctgaccccaggaaggaagtgcagaaatccttcccaggactccctgtcatatttccagtgagcttgaccaggaatgtcctggcaatcaaggtctgggttaggtaaggctgtttggtgacacagatgaggggagaaatctaaattctagcccagttttgacactgggtcctctgtagcctggatttagccctttatccctaatggccttggttttcgtctctataaaatggggctggattggacagtttctagaaagccttccatatcaaaaggcctatccttccagaatcccagacccagagatggcaaatacgtttcattttgtctttggttaactctaacccatcagtagagggcactcgaggcactctactgagatatgttatgaggctggatttggattcagcaggaaggagtgttgtggttgattcattctgtctacaacaatcagttaaaaaagtcttctgagattgagaaaggagagaattccagcctgttgtcctgcttttgccgggactgttggaacaggcagaacccatcagagggcttgactccaatctcatccaaattccagatgggaacacagaggctcagagtggacagggcttgccctgatcatacagtgacctggtggcaaagctgggagcccccagcaccagcctcttccccagccctcacccctgccccaggcatcagccaccatagagtcacttaccggaactgggctctgtggggtgctcctccttcgggatgggttgtgaggtctcatgactggggtcctctgttgttttccttgagggcctgaaaccccaaagccctcattattctgtgcctctagtccttgcccatctccacaggttctgcccatatcccatgtccattcttgaacaatgcccacaaccctctgaattccccaggtgccagacaagactcagcaccatggtcagcaacacgcccggcaagcgccccctgctggccacatccccatccccatccccctccctgtatccctgtgttaccgtctggcatttctgatgcagagaaaatagcccagttctgaggccacagcaatgacagccaggatcccgatgacaataccagcgatggcccctgaggacagggaggaggactggggacctgggcaaggagacagaatcaagacccaggcttgacacaccctcatccctgctcccagcccgttcccaagcttgcagctttttctctactgacattttgtgagcacttgttttccagtcgttgggaggtatcagattgtggtttttggttttgcttttttttttttttttttcagacagggtcttgctctgtcacccagactggagtggagtggcgtgacctcagctcactgcaacctccaggttcaagtgatcctcccacctcagcctcccctagtagctgggactacaagtacctgccaccatgcaggctgattttttgtattctttggtagagagggggtgtttcaccatgttggccaggctggtctggacctcctgacctcaagtgatccgcccacctcagcctcccaaagtgctgggattataggtgtaagccactgcacctgacctcagtctgtggtattaacagcatcatttctaaactaaaacatccagtttctgcgtccaaatttcagcagtgtgactttgggcatgctacttaacctctctaggcttcagttgtctcttttgtaaaatgggaacaatagggtttatagggcttctagaaagattaaacatacatgtattcattttctatatatatagtgtttgtttggaaccatggaaagtgatcagtaaatgttggccatgatgacaatgtcagttaggataatggatcaaatatggctttgtgtttctttcctcccagaatagaggcacagaccagagaaaagagctttggcaaccagaaacccggctttcacttagagccccttgactcactgcggccatgtgaccctggacaagtgaattcatttctgagtctcatttcttcatctgtaaatagcacaggatgtttgcaaagatgagatgaaatcatgaatgttaacacctggcacatactaggtgattaataaatggcaattgttttcatcaatattggcctgccgattgcccatctcacttctgcctgaacctctctcaaaagggtggaatcgagccactgagttaagaacacagctacaaggatcaggagggtgaggaaggagctctgctttggaggggcaggagggaacttcctggggtgcttcagggattcttaggttcatttctgcatctccactttttttttttttgagatggagtctcactctgttgcccaggctggagtgcaatagtgtgatctcagctcactgcaacctccacctccctggttcaagcaattcttctgcttcaccctcccaagtagctggaattacaggtgtgcactgccatgcctggctaatttgtgtgtgtgtgtgtatttttagtagagatggggtttcgccatgttggccaggctggtctcaaactcctgacctcaggtgatccaccctcctcgacctcccaaactgctcagattacaggcatgagccaccatgcctggccgcatctccatttctttatatgccaagcaaggataagaattccaaactctatagactttttaaaattttttttaaatttttaaattttaaaatttaaggccaggctggagtgcagtggcacgatcttggctcactgcaacctctccctcctctgcaaccactgcaacctcgctgcctcccaagtgattctcctgtctcagcctcccgagtagtgtgattacaggtacccaccaccacgcctggctaatttttgtatttttagtagagattgggtttcaccatgttgccccggctggtcttcaactcctgaccatatgtgatccacctgcctcaacctcccaaagtgctgggattacagacttgagccacagtgcccggcctctatagacttttgaagggattaatgagatcttgtataaaactactagcacagtgcctgatacataccagatgcttgacaaatgatgatgatgatgatgatgatgatgatgatgatgatagaagctgctatctagcaagctctaagcaccaagagaccttcatacatgatcttattcaaatcctacaatatccccgtgagcatcaactgaactccctgctgccttccctgagcctgttgctccatccatcaaatggtcttaataagaccacaagattgttctgaagattaaatgaggtaatttggaagttgatataaatggtgtcctaggcttagtgaacaacttgaggaggccagcctggtttcaaaccccaatgacaggatttgagtctataggtctcagtttcccttcctgtacaatgaagaaaccaacaggctcacctcaaaactggctgacagagagtacccaagaagtgtttgctgatattatatatgggaaagttggattcagacatgtggcacaggctcaataaataataattttaggctgagcttcgtggctcaagtctgtaatctcagcacgttgggaggctgaagcgggacgatcacttgagcccaggagtttgagaccagcctatgcaacatagggaggccccgtctctacaaaaaaatataaataaaaaactagctagctgtggtggtgcacacctgtagtcccagcttctcaggatgctgaggtaggaggatagcttgagtgtgggaggttgaggcttcagtgacccatgatcatgccacacacacaaaaaaaggaataattttatttgtttaacaaacacaatatgccaagcactgccctaagaactttacaaatgttcacaaccttcaacaaccctaagaaataggcagaattattatgttttacagataataaatcagaggcccagagagggtaagtaacttgtccaaggtcacacagctaacaagcattggagaaggatgtgaatcccagtgaacagtgacactgttaccttctcaagaactaaagacagagatacagggactccctgccagtcatgtccagttgttattaacatcatttccgattccccatatagctcactccttccctcactgggtatatctctgactcattgtccttctaagcaactctgaaagataggcatcacgatatgatttggctgtgtccccacccaaatctcatcttgaattgtagctcccataattcccaagtgttgtgggagggacctggtgggagataattgaatcatgggggtggtttcccccatactgttctcatggtagtgaataagtctcacgagatctgatggttttataaagggtttccccttttgcttggttctcattctctcttgtctgccaccatgtaagacatgcctttcgccttccaccatgattgtgacacctccctggccacgtggaactgtgagtccattaaacctctttttctttataaattacccagtcttcagcatgtctttatcagcagcatgaaaatggactaatacacatcacaaacccaatttacaggcaaacaaactgaagctcagaacagcttggagagttttccagggaacacagcaggaagtacaggttctacatttccctgaccactaggggttgggattcaacagctgtggactgagaacctgctcaggcagtgtggagactgccacactccagccctcggtaggggtagactaggtagctgggaccagcatcaggaaaggcccctcgggtcctgggagaaggcgaccctgagagactcacctaccaccttgaccaggactgaagtggagcgggccaggccagtgagagagttggaggctgtgcagttgtagatcccgtcgtgttcccaggtcagagccctgataatcagctgctcacccaggtgctccccggtggagtgttcaagagtccagcgatactcagcacctggcttggactcggcccaacactgcagggtcaggctggagttgagctctgcctctatggtgctgatcatctcagatgccgactccctggtgatgtgcacttggtcaggaccatctgtgtgtaaagccaaacgtgatgcaccctggcccccatcagcgagtcatcccattctgccccattcactttcaccttggaatttcagtaaaataaacagaacatactcccttttcctccttagctctctgacaagcagagtgtggtccacaacactgggggtggggcagatcaaaacaaaaacaagggccaggcatggtggctcatgcctgtaattaatcccagcactttggaaggccgaggcaggcagatcacgaggtcaggagatcgagaccattctggctaacatggtgaaaccccgtatctactaaaaatacaaaaaattagccgggcgtagtggcacgcacctgtagtcccagctactcgggaggctgaggctacagaattgcttgaacatgggtggtggaggttgcagtgagccaagctcatgccactgcactccagcctgggcgacagagcaagattccatctcaaaaaaaaaaaaaaaagaaaaaaaactgcctttgtaaaagttaattcaaagaagtgttttaggtcacccaggcatcagaaattgttgctaggccaagcgcagtggctcacacctgtaatcttagcactctgggaagccgaggtaggtggatgtgagtggaactcctgagaccaggagttcaaaaccagcctgaccagtgtggcgaatcacgtctctactgaaaaataaaaataaaaactagctggatgtggtagcacatgcctgtaattgcagctactcgagtggctaagaatcacttgaacctgggaggccgaagttgcagtgaggcaagattgtgccactgcactccgtcctaggtgatagagtgagactcaaaaggaaagaggaaagaaagaaagaaagaaagaaaggaaggaaggaaggaaggaaggaaggaaggaaggaaggaaggaaggaaggaaggaaggaaggaagaaagcaggcaggcaggcaggcaggcaggcaagaaggaaggaaggaaggagagagagagagagagaaaggaaggaaggaaggaaggaaggaaaggagggaaattgtggctgcgtcctgtgtatataatccctaacttctagtactgtgtattctcaatggtataaacacgtgcaaattttctttgtaatgtcagaggggatcattgtcacttttctcttccaccacatataagaaggaaacaaatgaaagtagttgttggatttctcatataaattaaaagagtttaggcctggggctgaggctcatgcctgtaatcccagcactttgggaggctgaggcagggagatcacttgagttcagggattcaagaccagcctacgcaacatagtaagaccctgtctctatttaaaaaaaaaaacctaaaagagtttaagagtcatactttatttaaattaatgtaaaatactggaaaggatgcaaaaggttgctaattgagacattctaggaggggaggaataccctgactctgctccctcctaaacatcatttgaacctgctcatttctccccatcctgaccccattgacacttggatccttcacctgcatcccagctcctcctggtctccccatcccagtctcatcctccacacagcagccagagaagtcttcctaagtactaaagtgtcactgtccctcctgtgttcagaaccctctgtggctccccagtgcccttgggacaaagcctatgtctgaagaggccatttacaatttgattcttacagaccccctccagccccacctttccacacctcttgctctcattcaggaattaaatcccactcggagattccatccttgttacactctctcttgcctcaaggccatcgcacactctcttccctctgtctagaatgctcttccctgactctgctctaagcagcctactcctactcatccttcagctcttatggtggacatccccattcatgatgaccctttgcaacatcccccagatggaggcttcctttgggctccccataccctccctttgtcccccggggtcccatttatcatgctatgttttatctgcctgcttagtgacctccccatccccagcaggctgtgaaagctgaaaatcatgtcaagtatcaaatgcccaacatgttgcttagcacagagagagcacaaaacatatatttttggtttaatgactgaattgaaaaggaaagaggagtgagcaacagagaagtgtaaagaggagcaaagacatgtactcaacccctacctctgtgttccctactgcttcgcatgtatgaaagtgcacccctcctttctctccctgcagaaacctcttctcccccaatcttctccatcttggttcgtgactcctacatcctttcggtggctcaggcaataaaccttacagtcattcttgactcctttctttctctttcacctaatatcagtcagcagcatattcaaaatacatccacagtgcaaccatttctcaacacccgacagttgccattctggtccagccctatcatctcttgctgcgcaactctggccaccaggagaagctcttcaaagacctccaacggcagaaatgtaattgaccaagggcccaattgctgtgcccccaaatctactcccagcccttccacaggctgcaccctgccagtacctgagtgcatccaggaaactaaggcaggccccttcctgggagatatggaaggtcccaacagccatgatgggtgttccttcaagtgcatggttatccaggtgcttccattcaagtctctgtccctcaccctgtcactcggggtcacacttgcatctcagtctctcagtctgatggctctcccagcctccctgcagctgcctccctagttatcctcacaggagcatttcccctaataaaacccttgcatgaataatcccgttaatcccaccttggggtctgcttctccaaggatctggacaaatacaactccttctctcactccccctctcccccacttctatgtttgcctccctgtagacaaaggccagtgagaccctgtgaaagcctaaatctggtggtgtccctaagccttatcacctgcttctctgtttatggtctggcttctccactagaacataagccccctgagggcaggcacttggccctgtccagtgcccagattcatgcctgacacagagcaggagctcaataatcatagcatgaatgactagaaggaagaacttaaagagaaggagggaagcagggagatggggaaggtccaggccctgggtgactcacagttgatggtcagctcaaggggctcactccgggcccggctgccccagttccagacctcacaggcatagggcccggtgtcattccgctggaggccatggatgattagggtcctgttgtcagctgacagctgcaggtgctcactgggcaggaggggctggccacttaggaaccactggacattcacactctgattgacggtttggcaggtcaggtccacagacctagcattctccacaaggttcaggcttgaaggcacgacttgaggcatggtcagtgtttctggaaacacgtggagatacacagtcaggttcagggagatttccctcatctcctgcccttgtggggcccacaagtttttccaggagtgcgtgcgtgtgtgtgtgtgtgtgtgtgtgttacaggtggtgtatatgatttgcataatgctggtgtgcggggtacgtgtatgtcttttgtggatgaatgtgtgtcgtgtgattattatgtgaatatgcaatgagttttgtgtgtatggagagtgtgtggtgtgtaagtgttttgcgtctcttgtgtgtgttgggtgtatgtgttgaatatgaagtatgtgtgtggtacacatatgcactttgtatgtgagtatatgctatgtgtatatatttgttgtatatgaatgtgtgttctgtgtctgtggtattgtttgtgttatgtgtttgtgttgtgtgatgtgtgcatatgctgtatgtgctgcatgtggtatgtgtgtgcattttgtgtgtgcattgtgtgtctgttgtatatatgtgttgagggtgttgactgtatggtatatggtgtgttttccatgttgtccatcttgagtgtctgtgatgtttaatggttgtaatgtttagtaggtgctgaatgtcaatgatatgtgttgtgtgtgtccattagtgcatattaggtgtatatatattttatgtgagtgtgtcatgtatatgtgatcttgtttgttgtgtagatgtatgtgagatatgtatgtctgcgttttgtatgtcatgtgtgttgtacatgtgttgtatgtgtgagcattttgtgtgtgtgttgtgagtttgtgtatatgtgttgtgggtttgtatgtatatgctgtgtgtatatgtgtatgtgctgtgggtttgtgtgtatgtgctatgggtttgtatgtgttgtgggtttgtgtgtatgtgttgtatgtctgatgtgttacgtactttgtgatgagtgagttgtacacctctgttgtgtgcatgctatatgtttgtatgttttgtgtgagtgtgtgttgtatgtctgtggtattgcacagttgtgtacgtattatatatgagttgtgtttactgtgtgtattgtacatgcacgtgagtgtgctgttcatgtggggatattatctgtgtgtgtacggagtgtgtgaatgttgtgttagtgtttttaaatgtagacagttaaaccccccacctccagagagtcaaatcatgggcaacccctagagagccaccagggtctcgtgcaggatgtgccaagccaggcaaaggagccagtgtgcccagccttccctgtagtcggagccctgctgcattggaaatccccctgggtcctcctcaaactctggggtatt[131 bp omitted]cctcagcctcctgagtagctgggactacaggcgcccaccaccacacctggctaattttttgtatttttagtagagacagggttt[141 bp omitted]atctgatgacaatcctagatccttcctctagaacacagcgcaaacatttttcatgcaactcaatgtcatgcagggatttctccctcacacagtatccaaaggccctggattaagaactcctggttccttctgacatggccagcatctgacgctcagaagaatgaaggagaggaaccgggaaaggagactcaccaagtactcggaccttcagagtacccaggctggacaggtgggtggcactgttggacaccaagcacctgtacaggccctcatgttctctggacacagcatggatggtgaatgttctcgtggtgtgagacagaatggagtcaaggagaaaccaagtataggcacagggtgggtgagactttgtttccgctaagaaggtcatgctggagccctccatcacctcaaccacctccccactggcaacaccagactccaatttgatttcaacaggatcaggaccatctgagaggacaggaacaattacagcagtaacaacagcatcagcaacaggtctcttatggaggtctttaacggatcaataaatactttatttccctcctccccactcaaaggctagatcaattgcaaacgaggtacagcagtcagatggagatgaaatgtcagcctcatccctgggtaaagcaagattgaaagacacgtctaaagtatgccagctgaatggttattgtagctcacacctgtaatcccagcattttgggaggctgaggcaagagaattgcttggagcaaggagtttaaaaccagtcagggcaacataccaagatcccatctctacaaaaaatttaaaaattagcccggtgcaatggctcatgcctgtagtcccagctactcgggaggctgaggcaggaggatcgcttgagcccaggaggtcgaggctgcattgagctatgattgcaccactgcactccagcctggacagcagagagaaatcttgtctcaaatgaatgaatgaatgaatgaatgaatgaatgaatgaataaagtgagccagctaatgctctttgctcacccctatccaggcaaggttttggatcaaacgtctgaggtttgggagctcaattttagttgagcttcacattaaggcatacaggcatgagccattgcaccgggctaatttttaaattttttgtagagatgggatcttggtatgttgccctgactggttttaaactccttgctccaagcaatcctcttgcctcagcctcccaaaatgctgggattacaggtgtgagctacaataaccattcagctggcatactttaggcatgtctttcaatcttactttacccagggatgaagctgacatttcatctccatctgactgctgtacctcgtttgcttcacattaagttggaggtttccagtagaatccaagtagagatgtcaaacagttatatgtctgaagttcaaaggtagacaagtccgcatctggatggtatttcaagctgtgagactgaacgaggcactaagcaagtgagtgtcagtgaggggttggagagaatggaaagggactcacacttcacatccaggaagatggggtcgctcctctggctcagaagggcatctcgagcttcacattggtaagtccctgagtcctcccgctggacaatgagaatggtgaggatcttgccatccttggacagctgcatgcgctcatggaacacaatggagaggttgttggaaacccagtggatggtaatgttgacgtccttagtggtgcagtagaaggtcaccatgtccttctgctctatggcagtgcctgggctgactgcaatggagggtttggccagctctgaaagcaagcgagggagacagaggcagagacacaggtagaggaagaacaaacaagacatagtcacagagggacccagagaaacaggactagattggaattgccagaagactctctggagttggatgcctgggcttgaatgctggatctactgctcattcttggtgtcatcttcggcaagttacttcccctctccaagccccattgaaagtgattgtgcaagtgaggcagagggtctgggacctgacaaggagtcaatcaatgtcagctgcaatgacaatcaagcttacgacatgggtgccagcaagggccccctacccactctttttctttattgaaacagggtttcattctgtcacccaggctggagtgcagtggttcaatcacggctcactgcaaccttgacctcatgggctcaagcgatcctcccacctcagcttcccaaatagctgggactacaggcgtgcaccaccaaacctggaggattttgtgttttttttgtacacatggggtccccctatgttgcccaggtgggtctcaaactcctgggctcaagtaatccacccacctcaacctcccaaagtgctggaatggcaggtgtaaggaactgcacccagcccccctacccactttttagccaactttgcccaccccagccatgacagccacagccctccctctttacccctgacccctggcacagctgactgaaccagttgttgctggaccctggctgagccaatcagattcgtcctctggggactttgggcgtgaggttcggatgagggatctccatggaggcagagatcagaatgaccgtcttgttttctggcccctacctctggatctgccatgaatctggggtgtcctgggggtcccaaacacaggcagaacaacatcctcactttgggtggcatcaagtgggttggcattgagggtgagctgggctgcagctggaggactccatacggtacaaagcgaggctacaaggggagagaggaggcattcagggagggagaggtgtgttgggggttgcccggctaaggtcttcagaagcacagggagctctgaggccataggactggcattccacccacagagacctgagtcctactcgttacttacagctatgtgacctgcagcatgttttcttgtttgtttggtttttgtttgtgtatgtgtttttgtttttgttttttgaggcagagtctggctctgtcacccaggctggcatgcagtggcgcaatctcagctcactgcaatcactgcctcccaggttcaagggattctccagcctcagcctcccaagtagccaggattagaggcacaggccaccatgcccggctaatttttgtatttttagtagagacggggtttcgccatgttggccaggctggtctcaaactcctgacctcaaatgacctgcccgcctcggcctcccaaagtgctggaattacaggcatgagcccctgtgccagctgcagcatgtttttgtcctctctgagcctcaatctcctcaactgtaaaatgggcatactatcacctgcttcctagggttgttgtgggggtggcaatgaatattggcaaactttgactgggtcccctgatagtcactgtgttctctccaatgatgtgccctctactggagacacgtgatggtccctgtattccacatagagaaaaaaccgatgctcagagaggtgatgtcactcaccaagatggtattgtcaatggcagaagctaaacttgaacctggcctgccaggccctgaagactgtgctctcaacactgtaattcctcctgtcagcccagagatggccacacagccaacccttgattaacaggtacttctactgtgatcttggtgaaaaatattaacttttggtacttcctctgatgtgccccaggcaagatctcacttgcatggggaggaaaggagaacaagatagcaggtttccagttttcaacggggtgtggtggctcatgcctgtaatctcaggactttgggaggctgaagtgggaggatcacttgagctaaggaatttgagaccagcctgggcaacatagtgaagctctgtctctaccaaaaatttttaaaattagctgggggtgttggcccgcatctgtagtcccagctacagtctgaaatgggaggatcacttgagcctgggagtttgaggctgcagtgagctatgattgcaccactgcactccagcctgggtgacggcaaaatcctgtcttaaaaaaaaaaatagaaacacacaaaaaaatgagttcccagttttccatttgatcattctgcacaccactacgggggctgcaagagactatgggacctggcgcggtggctcatgcttgtaatcccagctctttggaaggcggaggtgggtggatcacttgaggacaagagttcgagacctggtcaacatggtgaaaccccgtctctacaaaaaaatacaaaaattagccaggtatggtgatgtgcacctgtaacctcagctacttgggaggctgaggcacaagaatctcttgaacccaggaggaagaggttgtcgtgagccgagattgtgccactgcactccagcctgggtgacagagctagaccttgtctcaaaaacaaacaaacaaacaaaaaaaaaacacgagactttgctggggcccaaccccagcagctgtgctcacacgcaactgatctcatctctcccatgagctcaattaacacagaccctctgcacttctcaaaagggccccaatgtggcccaaacactgccccattccctgcccagtgagtgaataagggcacgagctcttaggaacaaatatgaactctgtcacttactagccctactatcatgggtaagggactttctctttgtgagcctcagtttcttccactgaaaaatggagataatagtagaactcagctcatctggtggttgtgaaggctgagtgagatatcaaatgtggcatgcttaacacagttcatagcaaatattcagccaccatgatggcaacgatgatgatgatggtggtggtcttgatgatgagttcttgtgtctgtggtttctctgcctcaaatgctattagaggttaggctcacagcctcagagcctgaccacctgggtttgaatctcatctttgccatttatttggtcaagtgatgttccctatctgagcctcagtttccccatttgaaaaatggcggtagtaacagttccagcctcacttaactgtcataaggataagtgaaatgatgtaagcaaaagcactgatggggcctcatcatacccacccgagacaggaagcctctctgtggaaagcctgccatggccccttccctctggctttcttctcacagggtcctgccgttgtcctaccaggaagaggcaacacttacagactcactgtggatgcggctgataactctcagcctcccaggactacagagcccctgcacccttccagggttagccaggaagcgccggcccagagaaggagaagctggtctcagggacacacagcaaggctgggctgagccctcacctctgcacatgacctgttgcaaaatcatgtcttcacttccaaaatacttttttcatcaaaatattctagtttctgccttttgtctcagatgccttctaggcagaaatttcacatccatccccatcctgatccgtggacctggccgctcagggctggcacagcctccctccacctgtctctcatctgcttgtctgaatctctgtgatactccaactctctccccgcgtttctgaatctatttctggctgtgtatttacccagttctttccctgtctctttgtcctctgtctccctctctttctgccccttcctgtttttcccactggtatctctttctttcttttctttctttcttttctttctttcctttctttctttcctttctttctttcctttctttctctctctccctttccctctttctttcttctttttcttttttttgacagagtcttactctgtcacacaggctggagtgtaatggcacaatctcggttcactgcaacttctgcctcccaggttcaagcaattatctgcctcagcctcccgagtagctgggattacaggtgcccgccaccacactcagctaattttcgtatttttagtagagacggtttcaccatctt[132 bp omitted]gtctctgtctctgtgcgtatctcttctccctgtatttctctctctttctccctgggtctctggttctgtggctgtgactccatctttctctgtctctctctctttctctgtgtacacagacacacaaacacacatctttgtctttctctcttgtctctggtctctgtttatgtctccttctgtcagtctcttgcatctgtatttttttctgtctctgtctctctgtgtctgtttctctctctgcctctgtcactctttcctcaagtatacacacacacacacacaccactgacaaatatacatatatctttgtctctctgtctctggtctctgtttatgtctccttctatctcttttgtatctatgtttatttctgtatttctctctttctttcttttttttttttttttttttgagacagggtcttgctgtgtcactcaaactagagtgctatggtgtcatctcagctcactgcagcttccacctccgagttcaaggttcaagtgattctcctacctcagcctcccaaatagctgggactataggagtgtaccaccacacccagctaatttttgtatttttagtagagacgggggtttgccatgctggccaggctggtctcaaactcctggcctcaagtgatccacccacctcggcctcccaaagtgctgggattacagatgtgagccaccacgcctggccctatctttatatctgtatctgtctttatttctgtctctgtctctgtgtctctattttttttctctgcctccatctctttttcctcgagtgcacacacacacacacacacacacacacacacacacacacaccgctgacaaatagatgcatacaacctccctcctcccgcatctgaaggaagcagggcactcacctgaaagcaggattcccatccagtggtgtccccatgagtcagcaggccccatgggtcccggcacctgacttcagtgtgccaggccgtctgtcgccccggcttgcacacacagatacagtcctcactccaggtgcagcccctccacctcccttctctcctctcccaccctgctacaaactcacacacacactgcagtaactgcagctcccaggacagacaggggtggtggcaggaaagtaactttgaccccacctctgccctctacccccagggctcactttccttccctgcccagcacaaagagcgggaagtccaggaaccctggagaccgggaactgcgattacgatagtcaatagcaatgataataaaaaacaacaatgaccagctccttgtccccgagagcttaataaccagtcccagtgccaagttcattataagcagccaataaatattaaatgagccggaatcatgcttgtgatatagatcctggtcataaacaaaagctctggagtcagaccggcaggaatctcagactgagcaggactgggggacctccaggaggagcctgacgtggtcttgggagaaggggcagggagggcctcctggaggagtggacatctgagctgaaacttcgagaacatagtaaaggttccatatataaaagttacttaaaaaaaaatctctatgacaagacaagctggtggtctttgacagtgtatagacctagacccagaagatttaacagaaccgaccagctgagggaactatcattaatccatgtatccatccattaatttaacaaatacttcctgaattctcttccttttttttttttttgagatggagtcttgctctgttgcccaggctggagtgcagtggcatgatttcccctccctgcaacctccacctcccaggctcaagtaattctcctgcctcagcctgcctagtagctgcaactacaggcgtgcgcctccacacccagctaatttttgtatttttagtagagacggaatttcaccacgtagcccaggctggtcttcaactcatgagctcaagcaatccgcccgcctcagcctcccgaagtgctgggattacagacgtgagccgtcgcgcccagtcctgaattctctcctatgctgacccctgctcctggtggtactggggacacagctctgactaagacagccccaaccctgttctcacagaggctcacagtccagtgggggagacagaactgtccccagacagtgacaacccagagtgggcagggctgggatggaggaattcaaagggggcgcctggctcagcttcaggatcagggagagcttcctggaagaggggacatggtagctgagacctgaacaacataggggtgagccagggggagcagcatgtgaaaagtttttgaaattggggcacagaaggaaggtcaggtgggtctagaatagaggaagtgagagaggatggatgattcaacaggcggcttagaaaactctggaactgttacttagggtatgaggggcagcttggcattgcaagaaagagatcgtgactcactcagctgcctcgttttgctgccctgcttccgtcttgctcctgctacaggcagtcacaaagtatctgccctgataaagcataaggccgagccagctggctctggagccagagtgcatgggttcaaatcctgactccccgacttgctaactgggtggcctcagcaggtcagctcccctctctagggactactttcctcagctctaaaatggagatgatgcccaggcacactggctcacatctgtaatcccagcactttgggaggctaaggtgggaggatcacttgagcccaggagttcaagaccagcctgggcaacatagtgagaccccatctcaattaaaataaaataaagcagagtagatgatgatgcttttgtctcctaggaagctctgtggttatgagcacttgacctcagtgtgccaggccatctgtcacccttgcttgtggcaccatttacaagcactaggctagctggctgcctgggctggcaagacagtcctttacatcccagccatggttcattgggaaaaatttgtcacccttgcatgcttccgtgtgctccatctgcagactgggagaaatcacagactccccgcacaagacggttgtgaggatcgaatgagtgagtgccaggaaagtgctcagagcaatgcctggcacagcgtaagccatcaacaaatgtgaattcccactggatgtcatgactgccctgcatcataatctcactgcagccctgtgagggggtacgcattcattcactctgttactgctgtggactgaatgtttgtctctctgtcattcagatgttgaagaaatcctgatcctgcacgtgatggttttaggaggcagaaactttgggaggtaatcaggtccctcccaatgggattagtgctcttataaaagggacctcagagagctctcttgttcactttccaccacgtggggaatgcaacaagaagacagcagtctgtcacccaagaagagagcccccaccagaacctgacaaagctaccaccctcatataggccttccagcctccagaactgcatgaaatagctttctgttctttacaaatcacccattctgtggtctgttctagcagcccgaactgaccgagagccactcaacatatatttcgtgagtgtctactgtgcctgttctaggtgctggggacatagcaggtaatgagaccatcagacgaggccaggtgcagtggctcatgcccataaatccaacactttgggaggccaaggtgggatgattgcttgagcccaggagtttgagaccagcctgggcacccctctctacaaaaaaattaaaataaaaaaaaataggcatagtggtgcgtatctgtggttgcagctactcaggaggctgaagagggaggattgcttgggtctgggagttcgaggctgcagtgagccatgatcgcaccgctgcactccagcctgggtgatggagcaagactctgaaaaaaaaaaaagaaaaagaaagaaagaaagagaaagaaaggaaagaaaggaaagaaaggaaagaaaggaagaaagaaagaaaagaaagaaagaaagaaagaaagaaagaaagaaagaaagaaagaaagaaagaaagaaagaaagaaaagaaagaaaggagggagggagggaaggaaggaaggaagaaaggaaggagaaaaaaaaaagagtggggtaaggaatatgattattccatcccatagttaaaaacactgaagctcacagaggtgagatgacttggataaagtcacaggacatctcaggccctggccctcaacctccatgtgcgtgtgcctttttccaagggcccttcgctattccccagccacacctttctgtacacccagatcaatgaacaccaatgtggccacatcaccccgccacgccttcagactctatgggtccctgtactgaaggcgcctgacccagaccagcccagcattcaaggcctctgccacccacctcgttcttcccagaatgtctgaaccttctgaccacccaccttctcctaagccagcttccctccccaccacctctgccctgaggcactctcccctcttcccctcctccccatccaagacaacagagctgctgctggaatggacttcccaaatctgccccttcatgcaaaagcagggtttcctctcctgaaattcccaccaactcacccactcagcccccagggcagattctgttttttgctgccccaaggaaagaaagggactttctgggcccctccctgtagcacaacttccaattatttccaacaggtgaaaataaaccaggtcctctccacttcccacccttacctaccaggtctcagccatgcaggctggctcaaaattgtgtcttcccacgggactgacctcccagcccaggatgctgccctatgactgtgccctcactgaggccattcactcagcaaagatttgtatggccctactatgtgccaggcactgtttcaggtatcagggcacgccagcaaatgaaacaaacagagatctctgcctttatagaaatgacatgtaatgagtgctgggaggggaggagggagacagataataattgagatacgtggaaaataactggctgggcacagtggctcatgcctgtaatctcgacatttcgggaggctgaggcaggaggatcacttgaacccaggagtttaagaccagcctgggcaatgtagcaagatcccatctcaaagtaaataaataaatgtgcttttttaaacatttaaaaacatgaaaatattaaaattaatttttttttaaaaaaattagaaaacgtagccagccacagtggctcatgcctgtaatcccagcactttgggaagctgaggtggaagaatcacttgagcccaggagttcaagaccagcctggacaacatagggagatccccatctctacataagatcaaagttagctgggtatggtggtgtgtgcctgtactcccagctactcagaaggctgaggcaggaggatcactgcctggagtttaagaccagcctgggcaacatagcaggatctcacctcaaagtaaataaataaatgcttttaaaaaatttaagaatgcagaaacattaaaaataaaaaaataataattaggaaatgtggccaggcacagtggctcatgactgtaatcccagcactttgggaggttgaggtgggagaattgcttgaacccaggagttcaagaccagcctgggcaacataaggagaacccatttcaacacaagatcaaaaagttagctgggtatggtgatgtgtgcctgtactcccagctactagggaggatgaggcaggaggatcacttgagcccaggagtttgaggctgcagtgagctataatcatgccactgcactccagcctgggtgacagagtagctgggattttgtctctaatataaataaatgaataaataagtggaaaattactaaactatctatgatgttggaaagtgatgtgtgccatgggggatgagggcaggcagcgtcagagtgccagagtgggcacgcaggattcaatgctaaagcaggcagtctgggtagccccatggagttttaagcaacgacttgaaggaggtgagagggcaaaatgtacatacatttggaggtttctaagaattaattcacttctgaaaaaaaaaaatgcaggcagagtcccaaggagccattccctgcctcctgcatttaaataactgagttttctatctgctgccacaataaatgcctccagacttggcagcttaaaacaacataagtttatccttttgcagttctgtagatagaagtccaggatggctaaatgacttctctgctctgggctttatggagctaaaataaaggtgttggcagctgagctcttaatgggggagctttgggaagaatctgcttccaagctgtcattcaggctgtggttggcagaatcaaactccttggtattataaagctggaaacctgtttctgcgatggttgccagctgagggctgcccttagctctggaggcctctctcctgtccttgcctttgagcctgtacatctcagagccagcaacgccacaacaaatccttctcgggcttgggatctctctggattccctgtctgctgcatctcttcacaattttttttttctttttagagacagggtctccctctgtcgcccaagcagtggtgcaatcatagctcactgcagccttgaactcctgggctgaagaaatcctcctgccttggcctccaaaagcactgggattacaggcatgagccactgcaccaggccctctgtctgccgtgtctctcttctgcttccagctggggaaagttatctgctttgaagggcttgggtgattaggttggacccaccttgataatccaggataatctccttattttgaagtttgtaactgtattagtccgttttcacactgctgataaactgagcagcttacaaaagaaagagatttaatggacttacagttccacatgacgggggaggcctcacaatcatggcagaaggcaaggaggagcaagtcacatcttacatgggtggcagcaggcaaagagagagcttgtacagggaaactcccccttataaaaccatcagatctcatgagacttattcactctcaggagaacagcacaggaaagacctgcccccctgattcaattacctcccaccaggtccctcccacaatacacgggaattcagatgagatttgggtggggaccacaaaacctaaccacatcagtaaccttaattacatctgcaaagtcattttgcttttgtaatgtaacatattcacaggtttgttcattttttatggctgagtagtatttcatggtgaatatatatcacaggttccaggaactaggatgtgggcacctttggtggggggtcactattctgcctaccataatgacatgatgtgaaagcaggaatgtctagagttcaggcagccattctgagaccatgaagtagcaagttcagcaggatatgcaatgcactgagggtggagggatggatgagaggatatcactgagccatagaataaacctagggcatcttgcaaaatgacaattatgatttttgccgctgtgatccaggttgtcttttgtttgcagctgaatgcattctacctggctcctttccagatcaccattggaagtgtttattggaagaccttgcatcaaaaccctgatctttcagaaacatagagtttgtagtagtgttctttttcttaaagtgtgctaaaacttgtaaaatcgactttgagaaagagcctactcaaaattactcttctgtttaaacagagattccagtctaagctcccttttatcccatatggggaaactagggcccagagggtacagtgaagtttttctccagggtcatagaactgagtcttcttggaacatctgggaaactcagttttgtaccgttgactttttgtgcttttcctgtgtacaagaagcaagatcagtataaatgggaaaataaataatgcagatccaggtaatagaatcccaacatctcatacccaagaacccctacacacacacacacacacatgcacacacaacacatcatcatcatcgttgtcgtcatcgtcatcctcatcatcaccatcattatcctgccccctgcagcctctacaccatacttgtttccatgactccttaaattcctagaatggcacagaaaacagacaaaagattagctcacagatgctattttattaaactcatgatgcccactgacatagaaagggacatatgttttctgagtcatggttcaaaggagtaaactttcccagaagcttctccagctgagatatcctcccctcaccaatataacaatttcactaacactctcccacttctacccactctgtcatcataagcatccacatcccactctacccagtcagagctatgacttcttcttctagaacttgggacaccaccaattagagagtaaaatactttggatcttccaagtaacctgcaggatacttttttttctttttttttttttgagacggagtttcactctgttacccaggctggagtgcagtggcacgatctcaagtcactgcaacctccacctcccaggttcgagtaattctcctgcctcagcctcctcagtagctggaattacaggcacccacgaccacacccgactaatgttttgtatttttagtagagatggggtttcaccatgttggccaggctggtctcgaactcctgacctcaggtgatccacccaccttggcctcccaaagtgctgggattataggcgtgagccaccgtgcccagccacctgcaggatacttttaagttcacctcaagatcgtgcattaacaattttgtaaggtgcttagctcttgtctcactactaggaagaaaagagtgtccaatcttgcattatcaagccagccatgaaaattccatttaagggagatggtggggacaaagaagcatggatgagggtcagacagagttctgtggtaggaaagtgagaggctcccaggagctgaaggatgttagagatcaactgatgacatgaggatattagctaatgctgccaaggactctgtacagactcctcagcctcccaagtagctgggattacagacacatgccacggcacccagctaattttttttgtagcgtttcagaggggagtctctctatgttgcccatgctggtctcgaacttgtggcctcaagcaatcctcccatctcagcctcccaaagcactgggattataggtgtgagcaaccgtgcctagtctgaactgtgaatttttgaatgcaaaagctgactgagctacttgagccacagcccttagagagttacacataatatgcaaagaaggaatgcaacataagaaagggtattctacatcataacacttctttttttttttaaattttttgagacagagtttcgctcttgctgcccaggccagagtgcagtggtgccatcttggctcaccgcaacctccacctccggggttcaagcaattcccctgcctcagcctcccgagtagctgggattacaggcatgtgccaccacacccagctaattttgtatttttagtagagacgggatttctccatg[139 bp omitted]tgaagctacaaggtaagtcctaatcatcatgcaatcccctgtctaaagcatttttgttttaaaaaaggaaagagattggggagtgattacaaccttctacctttcaatgaagatcacctcaaatctgttaaaatagctggctcagtgtctctttttggccttgggaggagttgaaatctctggtcagggtgttgaagactggtcacaatgcagttgacatctccatgcctctggaaaatatgaaaccttgctcaaccctacccaagaaagggactttctgttctggcctccatagccagaaacgcctctgcctcccccagctgtggaaggaatacttgattcccaactcagggtcagctgcccttactctctgctcaattcctcttttttctctgaaacaaaatatttgggcatctttctcgataccctcctttccctaaatcacctccaacatccaatcaatcaccaactcctaagggttccatctttgaaactcattaaccttcttttctgcccccttttctccatccgcatgaccttaccctaggcaatacctccatcttctctcgcctgtaaaactgctctgagttccccaaccctgacccccagcctccctgtcagtatacttaacccctccaacatgcccaccacaattctggccacctttccaaatcccagctctgaattagagtctctctctctcccctctaaacagagaggctcaaagaccctcagctgaccctacaagaagtctgggatgctgccattctttcctggtaaatcccctcccatgatcccttactgtccacagggtgaacatctaattcttcagtctggcatctgaagcttctgaagcatctggaggtaagtatttcatccttaccttgctgagctgaactccacaggattcctgggctggagagaaggaaagaagagttaagtcccaagaggcgagtggaaaaggtgtcttcctctgcagctaagccaatagcaggctgtcttcatcccaccttctgaaggagggaaagggggcaaaaagttgagatctctgcttcctaggcgagcccgaggtcccagagaaccctgaaggtagagcaaacctcgtgttatcatggtgaataatattggcgtccatcccaggaaactgagctaatgctctctgcccagatgtgcacagggatgacacaccacgagcgatcttggtcccatcccacccctattctgctccaggcttcaggtagcacagtggttaaggacccagactctacagtgagagagaaatgggttcaaagctcccccagctcctctgctcaccgtctatgtgacctcgagcatgagacagagcctctttaagccccagtttcttcttctgcataataggtgtaaccctagctcctccctcctcgatgaaatgaggagacgctgaatgcagtggctcagcagagggtgaaatacagcaagcccacaggaaatggggctgcagtcatttgtctttgcacaactggtagtaggatggagagtggacgctcaaagataccaggtcctaacccttgcaacctgtaaatgttacgtcataaggaaacaaggtttttgcagatacaattaaggatcatgagatgaggaggtcatctagatgatgcgagtggacagtaaatgtcatcatgagtttcctcattaaagagtagagggagattggacacccacagaggagaaggcaatgtgaagagaagcagaaggtgacccggacacaagtcacagaatgccaccagccagcagaaacatgactgcagcagacccagggtcccacgcccagaaacctccagaacacctcaagggaattgtaaaccagcaagagatagctttacatttttttttttttttttttttgagacagggtctcactctgttgcccaggctggaatactgtggcatgatcatggctcacagcagcctcaaactcctgggcccaagcgattcgcccatctcagcctcttgagtagctgggaccacaggcatgtgccaccacatccaactaattttttgtatttttggtagagacagtttcaccatgttgcccaggctggtctcgaactcgtgagctcaagtgatccacttgcctcagcttcccaaaatgctgggattacagtagtaagcctctgtgcccaacctaggtagtgatatttatgattagccatgccataattataatatgatattatacctagggtttagcggacactatataaatgttagttgtaactaataatggttattttaacaatattattaatagacaaatttagttaccatttacatatacagacattagctaagtcctgatgatgccggtgaattgtctccacaactataaggtaatggctacctttatccccatttcacaggtgaggaaactaaggcaatagtggttaggacacccttccaaggttgccactgcgaggagctggtgacagaggggtttgaattcacttccatctgactcaagagcccaggatcgaactcaggacaaatgggtggtgccccagcgccagtgctgactgccagttcctgagcaggttcttcccctgcaggcccacccactggtcctcagtgcccctggtccctgccagtgaagtttgcagctcccagataagtagccccctctgggatccccactcagtcctggctccgtgacctctgaggggcccagagctggtacctgggaccttatgaccccaacacagtagccagcagtccctgtgagcaccacgctgatcaggacactcgaggcaatccctgcgatgcctccagcaggaatagtggtcctgagtaaggccggctgcagttcatccccaggaacctctgcaggaaagagagagagaaggagaaagagagagatagaaagagagagagggagggagaggaagagagaggtgtcagtgctggggctctgggtttcaggtcctcagagctgttccctccatgtgctcaattcgaaccctcctctccccccattttacagattgggaaactgaggcccagggaaaggaagcgtctgtaccagataataaatataacactcacagatgacaggaataatgtctggtaaactatattatctcatttattcctcaagacaaccctatgaggaaggcattgttaatatccccattaaagaaacaggcactgagaagttaaactacccatccaccatcacacatggggtagagttagaatttgaaacatgttgatgccagagcttacactctgaacctctgcactatgtggcctctgaggatcacattcatccattcctcattcaacgaacatttatttagcacatactgtgtgtgccagacacctttttaggcactcgagggatattgcagaaaacagaacagacaaaattcctgatgtcctagagcttacactttaggagggaactgagacataaaacacacaatgagggccagg[138 bp omitted]gtggcacgtgcctgtagtcccagctactcaagagactgaggcaagagaatcatttgaacccaggaggcggaggttgcagtgggtcaagattgtgccaccgcactccaccctgggcgacagagtgagactctgtcaacacacacacacacacacacacacacacacacacacacacacacaatggagcaaatatataaagtgatgacaagcattataaaggagtagaataagatgctattcgaggatctcacaggaggaccagacttagtctggggaaatcagggaacgcatcctggaggaagtgacatttaagctgagatccaaaagacaagtccaagatcagctggtagaggggttagtctcctgagcaaagtggccagcattcattcattcattcatttattcattcagcaagctgttctaggcactgatgatacagcagtcaacacaacagacaaggtctcaaccgtcacagatctggccacctggatggagagattgatgataaataattaggccctaataataattagggcctggcatggtggctcacacctgtaatcccagcactttgggtggccaaggccagtggatcacctgaggtcaggagttcaagaccagcctgaccaatatgacaaaaccccgtctctattaaaaaacatacagccaagttcagaaggaccacccaactgacctgcagacttacaagctgtaacaaattcttattgtcttgagccactgggtcttggcagggggggcattttatgcagctttgttgaggtactatatgattgacccaagccccagaacccacttatatcaggcaagagactctgagccattatcaccacggcatctcaacacccacctgagatccagatcttcccattgactgagctgcagaggtgagtgatgctgttggaggcctcacaggtgtacctgccctactggtccagagtgacctcagaaatgaccaggtgctgggtggcagggcctggccttctgtccatctcccagtggtactgggcaggggggtttgagtcagcaaagcaggacagggtgagggctgccccagctgtgacctctgggtctggagggttgaccataggagggtctgggccatctgcagagaattgagaagaccaggccagagggaagaggaaaggcctttgtccatattacaatgcattggccattgtctcagatgacactcttccatccccctccagtgcacaactgcatttgacactgttggccatctcccttctagttgctttcttgtcccctaccaccaccaccacctccccataccatattctctacttctactgtgcagctagaggtatccttttcaaagcttgttcaaacctgcgtcacatcatgtcccttctctgcacaaacccttctttggctgctgtctcatgcagggtaaaagccaaagccctcatcatggcccacaggccctgcacagtctgtcccattacctctcttggggcaagacagtcctcttcttcctcactctccttcttccctttacttcagccactatgacctcctctctcaaaaccacactcccaccccaggcttggcatttgcagtctcccttccacaaaatctccccttggtgccctctctcactttgtccaggacagacacttccagctttgccaacagaaccagctaaacttcagccgctccttcacccctcaaccacactcctatgcacatctccacccatcctttatcaggtcctggactcacatgtaactttgatgagagtggggttgctgatgctgctggtggctgagttccagctctcacactggtagacccccgtgtcattcctggtgatgttcgacagagtcagtgttctgcagtccagggacagctccctgtggccaccaatgaagagcttctggccattgacatcccggcggatggccacagtgctccttggaggaaggcaatgcagactgatggaatccacatgctccactggggctaagttactggctgtgacattgggctgaggaagtgtctctgcaggaaaattagaaagaggtagaaatgctgagtcctgcccagatcatgggcttagagaagaacacccttagggaacacccttagggctgaaggaattcagcacacttgccaatcatccatccatgcacctgtccataagtccatctactctccaccaactcagcctttcctacattcattcacccaattgttcactcttccagtcacccttctatttatccatccaccaatttgtccctcaatccacccatctatccatccgtcatccatccatccatccatccatccatccatccatcctatccataaatctaccttcccatctacctacccacccagggatgcatacatgcacccatcttctcaatcattcaccatttttttcacccatttgtccacccaatcatcttttccaatcacttaccacccacctaaattcgctcatccacctatcccttcatttacccaatcacctattcattcatcacccaatcacctattcattcatccaccaatccatccattgatcttcccttctgtctgtttacttaataaattaacacttctggagcaccaaatatgccccaggctttgtgctaaatgctttacagacacaatcttatatcctcatgcttatatttcaagagaagggtggattttaacccatttcacaggtgataaaactgagcaaacaataaaaagaaccttcatcaattgagtacttaatttgtcgtagatgttttatgtgtgtgattcattagacttcacaacaaccctgtaaatccccatttgcaaaatgaagaacctgaggctcagggatgatccatgactaacccaagatgaggacattgatccatgggggcaaatgggattcatgctgcccatctgcctgcctctttcctttctcgctgacctgcattacacccagggtgatctcccacacagctgagttgtaccctctgtagctcctacgaatcacctggatgttgagatgcactgtgctataacatccttttattctcctaagtcataatcacaccatacaaataagaaaaggatctcagaagggtaaccattgaaagcaaaaattttcatccctaaataacttttataccaatatttttaaaaatttggagcaagatagcacaactcttctttataaaggaaaatacatatgcagtaatttataagaaatagatactggaggccaggcactgtggctcgtacctgtaatcccagcactttgggaagccaaggcaggcggatcacctgaggtcaggagttcgagaccagcctggccaacatggcaaaaccccgtctctactaaaaacacaaaaattagccagatgtgctggtgcacgcctgttatcccaggcggctgaggcagaagaatcacttgaacccaggaggcagaggttgcagtgagccaagatcatgccattgcactccagcctgggtgacggagtgagactttgtcttaaaaaaaaaaaaaaaaaaaaaaaaaagagagagagaagaaaaaaaaaaagaaataggtactgggaatgaacctgtaagagggtataacaaaatattagcagtggtcatttctgagaatgtagagtttttacccttttcctttttaaaaatatttgtattggtaatttctcttacactggatatacagtatgtattcaataaagaaataatcagaatgtaggatgtaatgtggctctatattaattaacagaaagacattaaagattaaaagatgaaatttaaaaacagtttaaacaataataagtatagtctaatactatttgttgtttaaaaatacatatatttggccggccacaatggctcacacctgtaatcctagcacttttggaggccaaggtggacggatcacttaagcccaagagtttgagaccagactgggcagcacagcaagaccctgtctctacaaaaaggacaaaaattagcccagcgtggtggcatgtgcctgtagtgccagctacttgggaggctgaggtgggaggatcaattgatcccaggaggttgaggctacagtgagcaaagatcaaaccactgcactccagcctggcagacagagtgagaccctgtctcaaaaaaaaaaaaaaaaaagaagaccacacacatatatttgaatgtatatacaaaaacagaggaattatagaagccctgtggctttttctgggaggcttattgtggaaaacattttttgccttcttgcccatctatatgatttactttttctacaattattgtgaaatttatttaaaatgtgaaaaaggtggcatataatattttttttttttttttttttttttttttttttaagtttccttgtattttgaattctttttttttttttttttttttttttttttttttttattatactctaagttttagggtacatgtgcacattgtgcaggttagttacatatgtatacatgtgccatgctggtgcactgcacccactaatgtgtcatctagcattaggtatatctcccaatgctatccctcccccctcccccgaccccaccacagtccccagagtgtgatattccccttcctgggtccatgtgatctcattgttcaattcccacctatgagtgagaatatgcggtgtttggttttttgttcttgcgatagtttactgagaatgatggtttccaatttcatccatgtccctacaaaggatatgaactcatcattttttatggctgcatagtattccatggtgtatatgtgccacattttcttaatccagtctatcattgttggacatttgggttggttccaagtctttgctattgtgaatagtgccgcaataaacatacgtgtgcatgtgtctttatagcagcatgatttatactcatttgggtatatacccagtaatgggatggctgggtcaaatggtatttctagttctagatccctgaggaatcgggtggcatataatatttttaaagcaatcctatcaatgaaaagtcattttgttggttaaagaatgtaaaaatttattctgcataacacaggttagaaaaatcttgctgaatatataaagaagtgaaacagcaaagaaaagaattctaaaaaacaaaaccaaacccaaattcgccaatgaagtcctggggcagagaagaatttttctcttatttttttctttttcttttttttttctttgattttgaagatttcaccattaaccaatcaccctcaaccctggcttcatacctgagacagtgatgatggtgtccatactgctgtgcaagccggaaagggagttggaggccttgcaggtgtagacccctgagtgtgccctggagagactgggcatgaagagggtctggccctcccatgtggtgaccccactgaagctccatgtgtactgggcaaggaggtgggagtaggctaagcagaccagagtgaggttggaaccaatcacaaaatctgggtccagtgcggtcatgatgggggtatccgggccatctgaacaaggagaaagacttcctaattaggaagagtatgagaagtaaggaccacccccctagattgtgcatttcagctcagtgttggaagcctgacatgttgagggaggcacacagcaccacaacgtaaaagtttgtcagaggaaggaagggagggaggggaggaagggagggagggagggagggagggaggaaggaaggaaggaaggaaggaaggaaggaaggaaggaaggaaggaaggagggaaagaacaaacgaaccatggctggcggtagcctccctcttgtgtctattaccctccttgatctttgaagactgtcagctccatgaggacagggatatgcttgtcagttatgttaactgctttgactagaaataacacccaatacacacagcacacagtggatgctcagtagatgctttcccaaaagtagagagacagaggggcagagagagaaaaacacatgggttcaagttcttatctttcttcttgaccacggtgagatcttgggtgagcccttcccctttcttaatctcagttttcttgtttgtaaaatgtggtgtctctgaaagtccttccagttctgcaaatatttatgttgtcgagtctggaatttctgggatcttggcttcctacaatctccatctacctttgtacctgagattgaatgggtctgaaagtccttaattgggtacatagtagaagctcaatacatgccccttaaataaataaatgatgataaacttctgagagaatagtcattgtaaacgtctattaagcacttagtgtgcagagtagtggaaaagaataaagaaaaaaagagaaaaaaagaagcacttgctatgttccaggcactattctaagttccttaaatgaactaactcacttaatcctcataatcacccaatgagatagataatattatgattctcactttgcagatgagaaaactgaggacatagaaaagtgaagtgacttgcccaaggacacctagctaagaaatagcagggacggctgggcgcagaggctcacgcctgtaattctagcactttgggaggctgaggcaggaggattgcttgagcttaggagttcaagactaggctgggcaacatagtgagactttgtctctaccaaaacttgtaaaaattagccaggcatagaggcatgtgcctgcgatcccagctactccggtggctgaggcaggaggattgcttgagcccagaagggcaaggctgcagtgagctatgatccagccactgcactccagcctggacaacagagtgagaccatgactcaataaataaataaataaaagaaacagaagcactaggatttgaaccaaggcagtctgtagagtctctgatttaaacgctaagctataaatcatggatgaaccagtagatagttgggctggaggttctgtgtggatcagaggtgagtcagagcaaagaaacccagacttacaagccacgccaaccacgagggcttcactgagcctggatcccaggtggttcctggcctcacagtggtaggtgctggagtcattgcgtgtgactgtggggatggtgaggaccctgccatctctggagattactggtccatccccttcctgaatcacctcaaggttcagaaaccactggaatgtcctgtcattgtttggagaaatgcatgtcaaattcaaggagtctgtgtgctccagaggggccaagttctgggcttccaccgggggctggtgcagcttctctggggagaaggaaagagaaagaatggcgttataggacatgggaggatctggaaccctaggaatgatcagcagcacgaataggctggggaccttggaaacaccagcgttggctttgctgtttccaagatgaccaataagcacacacacacacacacacacacacacacacacagccaacagctctacttccggaagttcttaactgtctagagatcccagatcctctccccagaaatacacccaataacacacacaccacacaaatacctacacatttgtatataatttcaaggggttatggggcactctaaagaccaactttagatttcaagtgaggaatcttatacctagattacaaattagtaaatatctttcttttttgagacagggtcttgttctgttgcccaggcttcagtgcagtggcactaacacggctcaccatagtctcaacctcccaggcacaagcgatcctcccgcctcagcctcctgagtagctgagatccatgcatgtcaccatcctcagctacttttgaaaaacttttgtagggtggggtcttgctgtgctgcccaggctggtctcaaactcctgggctcaagtgatcctcctgtcttgacctcccaaagtgctggcctgacaggaagtaaatatctttcttgaagtcaacttagaaatacaagttgaaagttacacatgtttatataacttttgacccaatgattacacttttaaaaacagttttattgaggtataataagcaaataaaaatgttgtatgttcaaagtgtacaacttgatgttttgatagttgatctctacaatcaagctaattaatatatccatcaccggctgggtgtggtggctcaggcctgtaatcccagctctttgggaggctgaggaaggtggatcacctgaggtcaggagtttgagaccagcttggccaacatggtgaaaccccgtctctactaaaaaatacaaaaattagccaggtgtggtggcacgcacttgtaattccagctacttgggaggctgaggtgggaggatctcttgaacctggatggtgggggttgcagtgagccgagatcataccacgacactccagcatggacaacagagtgagactccatctcaaaaaaatgaaaaaaaaaaaaaggaagaaaggaaaaaaaactgctggatgcttgcttgcattgcttccattgcttgcactgcaagcattatctcatgtactactggtaccaccctgtgctgtaaggactattaatatcccattttacaacaggtaaactgaggtttatgttgggtaagtgagttgtgaaaaaccaagttgtaagtgggtgaatcatttttaaactcagggctatgtgactccaaacttcataaccactgtgaaataaatactatgtagaaaaatctatttttaaaaaatctcagaaaatgaagcaggcacagttttccctattccatcccgagcacagttaaaaaccttggatattatcacttctacactgctggtgggaatgtaaactagtacagccgttatgaaaaacagtgtggagattccttaaacaactaaaagtagaactaccatttgatccagcagtcccactactgggtatctacccagaggaaaagaagtcattacacaaaaaagatactcgcacacgcatgtttatagcagcacaattcacaattgcaaaatcgtggcaccaacccaaatacccatcaatcaacaagtggataaagaaactgtgatatatatatatatgttcatatatacgttcatatatatatgttcatatatacgttcatatatacgttcatatatacgttcatatatatacgttcatatatgcgttcatatatgcgttcatatatatacgttcatatatgcgttcatatatatacgttcatatatgcgttcatatatatacgttcatatatacgttcatatatatacgttcatatatgcgtttatatatacgttcatatatgcgttcatatatatgcgttcatatatatgcgttcatatatacgcgttcatatatacgttcatatatacgcgttcatatatacgcgttcatatatacgcgttcatatatacgcgttcatatatacgttcatatatacgcgttcatatatacgttcatatatatacgttcatatatacgttcatatatatacgttcatatatatacgttcatatatatacgttcatatatatacgttcatatatacgttcatatatacacgttcatatatacgttcatatatacgttcatatatacgttcatatatacgttcatatatacattcatatatatgttcatatatacgttcatatatatgttcatatatatatatatatatatatatatatatatgaatgatggaatactactcggtcataaaaaggaatgaattaacaacatttgcaatgacctggatgagactggagactattattctaagtgaagtaactcaggaatggaaaaccaaacatcatatgttctcactgatatgtgggagctaagctatgaggacacaaaagcgtaagaatgatacaatggactttggggacttggggtgaagagtgggaggggagtgagggatgaaagactacaaatagggtggagtgtataccgctcaggtgatgggtgcaccaaaatctcacaaatcacccccaaagaacttactcatgtaaccaaaccgacctgtaccccaataatctatggaaaaataaataaaataaaataaagcaatagagaaaaagcctcaaaaatatgaacagaacatcattgttctatgggaataatatcaagcagtctatcacaggtgcagctaaagaatgaataaataaataaataaataaataaataaataaataaataaaaatagatgactcggaaaggaggagagaatatggcagactggctgcggatctcaagaccggagaaagcacatggtggtgagttttctggactttctttgcgcctcacagatcccagactgggagctggagagcctggcaatctagaaatgccaatgagtgtagatccaaaagaggctcaagcaaagcctgctctagccaaaggacaaggagcagtagcctgacaagatttgctaaagacagcaaatctttacaagataatcactttgctgctgtgatatcccacagaaaagcctggacatttacccttgccagctgtacagagacacccatcccctccaccaggctgaataagcagctgggactgtcatccttgcccagcagtaatgagcaccgaccctgcagtgtccattgaggccactagggagcggtaacgaggcgtctctgccccttctgggcaagatggtatcagaggatgtctcagtggaaagcctgaactctgctaactgcccagagtaacagttgccccgccccacctggaatgtcaacagaggccaaatggggaacctggacctccatccccactggctataacaagatggtgccctttttgccccaccagcaagatgtcagaggagacctgctataacagaagatttaaatgagatccagcgtctcataatttccaaaatgtccagggtgttgttgaaaatcacttgtcatacacctacatgtaatcccaatactttgggaggccgaggtgggagaattgcttgagctcagaagttcgagaccagcgtgggcaacatagtgagaccccatctctacaaaaaaaaaaaaaaaattgactgaatgagaaagacattcctgaaattaaatgaggaaagacaattaatagagatgacatggattgttgttgatgttttctaacttggtcttgagttttctaggggatttagttgtagatgtttaaagtgtaattttcactggttacttctttatcttggtggtcggcctaatgcctacatgtctgacctgtgaccaggtgtccctctcacagtacacttattttttgtgtgtttgtttgtttttgagacagagtctcactctgtcacccaggtcggagcgcagtggtatggtcttggctcactgcaacctccacctcccaggttcaagcaattctcatgcctcagcctcctgagtaggtgggattacagacatatgccactacacccaactaatttttttttttttttaagtacagacggggtttcaccatgttggccaggctgatcttgaactcctagcctcatgggatcctcccaccccaacctcccatagtgctgggatcacaggcatgagccatcacacctggccacagtacacttgtttataatggcagacattcttaaggcttttgtctgacctgtgtccagtttatttctacaaagagagccatgctttaggacagccctgaccaggaaagacgttaggtttggatgtgtcagtcaggtgagacacagaggaggcagcacaacaaaacacatgaaataacaggggcagtttattactcacagattccggagaagacagagcagcacatctcacagagccaacaggaagaagagagttgtcgggacacgcacactcaaccagcgggtggggagcaagaaagagaaagtgagagacctgtgggctgatgcttttattggagtctaaggaaactgctcaggcagttttccacagagaattctaactgggtttagagccagcaggcacaagttgcatggagtcacactgactgggaggtgatcactgtggcatatctgcacagcctatgcagggtctgggggtcagggggacagtcaggtgagttatatctagctgttgcataaggaggtggttaacaggaagtggtagtgtaaggcaggtatctggatctgccacattaaggatctggggggaggcggagacctggaaactgtgtcaagggtgactaagcttttcttatggtatgagaaagtccaacttatattcaaaatagatactgagccaggcacagtggctcacatctgtaatcccaacactttgggaggctgaggcaagaggattgcttgagctcaggagtttgagaccagcctgggcaacacagtgagacctccgtctctacaaataaaatttcaaaaaattagctgggtgtggtggcatacgcctatagtcccagctacttgggggactgagatgagaggttcacttgagcccaggagctcgaggctgcagtgagccgtgattgcaccactgcactccagcctgggtgacagagtgcgaccctgtctcaaaacaataacatttcaaaaattgatactgagtttctataaaattgtaagaattcactacactgatgttagaattgtcttaaaagaatcttagagcagccaacataaaaatgcttcaatgaacaattacaaacacttgaaataagtgaaaaaccagaaagtctcagcaaagaaatagaagatatgaaaaagaacaagacggaaattttagaatggaaaagcacaataacagaaattttttaaaaacttaatgtttgagcccagctgcagaatggagatgacagagataaaaatcagtgcagataaaagttaccaaatctgaacaacagaaagaaaatagactgataagaagtgaagaacagaactttgggacctgtgggactttaacaaaagagccaacattcatgtcattggagacccagaaggaaaggaggaagtgggtataatggctggtttcccaaatctggtaaaagacatacatctatggaatcaagaaactgagtaaaccccaatgccagcgtggtaatcaggattctaaatatagtccttccagatttctgttcctgattgttcaatcaaatgctaatctaggtattgctttgaagggattttgtaattaaagctcaaagtcagctgatcttaaaatacagatcatctgggtgggcctgacctgatcaggtgactcttttaaaagcagatcagatgagaaagtcagagaatcaaaacacaaggaggattcaatgcatccttgctgtctttgaagatgcaggggtcaatgtgtgagcagggtagagtggcctgcaagagcttagagcacccgcagatgacagccagcaaggaaacagacctc[298 bp omitted]ctgaatgagcttggatatgggttctttcccaaagcctacaggtaaaccccagccaactcacatcacaccttgattttgacctggtgagagaacccagttgaggacacttggacatcgaggtacagaaactgaaatagtaaatgttattcactctcttagttcacccagaatcagactctgcactagaatgtaagtgcaattagtttattatttatttatttacttttttggagatggagtctcgcactgtcgcctgccaccacgccaggctaattttttgtatttttagtagagacagggtttcacca[137 bp omitted]ggaaagtaagtaagggaaaagaaggaagccatatagaaaaattagctctatagaaaactggagctcacctctgaaaactggtacaaaacacacctctgagggccgggcgcagtggctcacgcctgtaatctcagcactttaggaggctgaggcaggcagatcacctgaggtcgggagtttgagaccagcctgaccaacatggagaaaccccctctctactaaaaatacaaaattagcccggcgtgctgtcacatgcctgtaatcccagctactcaggaggctgaggtgggagaatcacttgaacctgggaggcggaggttgcggtgagccaagatcgtgccattgcattccaacttgggcaacaagaacgaaactccatctcaaaacaaaacaacaacaacaaaaaataaaaccacctctgagttgttccccctaagttcaggggaatatatctaccaattccttcttggtgttagttaatggtcactcccaggatgttaatttctctgacattttcagcctgccctcagttggggcttgcatcctcttgtactcagagaaatcagagaggcacagacactcatggaaggggttgcggaagtactcaccactctctttcagtcatttcgagaatttctcttctttcatcattcagtcgtcctaaaagtcctgtgtgtcaataataaattacacccactgaaaggaagacgtatatttacatttcatggcctttcattttctattagtgtccccttcattccactccatcttattattagaatgattctaccagtgtctttctggaaaataggtgtaggaataaatttattctaaaaaataaaacaacatctacgcaaagaggtcttaaaaccttcataattagctctataaaacaattaactccaagaagtaatgctgaatgctttccaaatgcatactgacagtaagaaaacattatcaaatacccacatttgcattttttctagacatggttacagacctaaatccctcagttgatcagcttgagggaccaaataaatctctgttatcggtatagcaacagcacttacttgttttgtagcagtcagggcataccaaagtaagatcaaagaaaaaatagaatctcacgaaatatattttctcaaggtaaaccctcaccaaattataattgaatgattagtctggtataattttagtagaaaaattataggaaaaaaaagacaggacaaaatatgataattgagttggcaaagatcaactcctaagcagctaatttagtgttcaataaaacccaaaaatgcagaagcatgattttcccatttatagtatgttcacatactataaatgagttattttaaccaatttagaagtaagacctggccaggcatggtggcttacacctgtaatcccatcactttgggcggcaagacaggtggattgcttgaggccaggagttcgagaccagcctggccgacatggccaaaccccgtctcttactaaaaatatcaaaattagctgggcggggtggtgcatacctgtaatttcacctcctcagaaggctgaagcatgaaaatcatttgagcctggaggcagaggttgcagtgagctgagattgcaccactgcactccag[132 bp omitted]ccagcctggccaatatagtgaaacccgtctctactaaaaataaaaaaatcagtcaggcatggtggtgtgtgcctgtaatcccagctactcagtaggctgaggcaagaaaattgcttgaacccgggaggcggaggttgtagtgagcagagatcctgccactgcactccagcctgagcgacagagcaagactctatctcaaaaaaaaaaaaggaagtgagacataagtattgtattgtatcatgataaagcaattatttggcattacaccttaatgaattttatccagtcaatttgcctttgtagacacagagtgattcatgtaatatgatatgtagcataatcaagtttaatctctgtaataatggttgtttatctgtaggctatagttgtaaaagaagaataaataaataaagcaatctatcaatcttgatcaaacaatgtagcccacagttgattcagatgttacaataatgtagttggtacaactcactgggcagcatataccatgagcactaatgaaaaataaaaatcatggcaaggcgcgatggctcatgcctgtaatcccagcacattgagaggcagaggtgggcggatcacctgaggtcaggagttcgagaccaagctggccaacatggcgaaatcccatctctactaaaaaatacaaaaattagccaggcacagtggctcatgcctgtaatcccagctacaggggaggctgaggcagaagagtcgcttgaacccaggaggcaaaggctgcagtgagccgagatcatgccactgcactccagcctgggcagtagattgagactctgtctcaaaaaaaaaaatgaaaaatgaaaaatgaaaagcaactgcatgaaagtcaattcagtttatgcctagccttcattaaagaccaacaagaaaaaataacaaaaaaaaacaaaaaataaatgtttcagtgaaaatctcatttgggctctcatctacaggacagagtgtagatggaaaatacatgtttgatgtaataactgatcttgtgatatacctttatgattgtaaatagttgatatattaagaaataatagtaaaataaatgttattttaagcctccaaatttgtgataattttgttaggcagcaataaataataaaaaaaaaaactaatacacccaaacagaataaacccaaatgaatctatgccagggcatatcataatcaaactgttgaaagctaaagatgaatttaaaatcttgaaagcagtgaaagacaaatgataccttacccataggaagaaaacaatttcaatgaaagtagatttctcatcagaaactatgaaagccagaagaaagaagcataacattttataagttctaaagaactgtcaacccaggattctataaccagcgaatgaaaaagatgtacatttatatgtatacatataaaatatgtatatatgtatataaatgtatatacatttataggtatacatataaaatatgtatatatgtatataaatgtatatacatttataggtatacatataaaatatgtatatatgtatataaatgtatatacatttataggtatacatataaaatatgtatatatgtatataaatgtatatacaattatatgtatatattatgtatataaccattcaagaatgagagagatgtacattttaaaataattaaaagaggccgggtggggtgactcactcctataatcccagcactttgagaggctgaggcggacagatcacttgcggtcaggagttcgagaccagcctggccaacatggcaaaaccccatctctactaaaaacacaaaaattaggcaggcttggaggctgaggcaggagaattgcctgaacccaggaggcggaagtgcagtgagccaagattgcgccactgcactccagcctgggtaacagagcaagactccatctcaaaaaataaataaaataaaataaaataactaaaagagttattgaattgtaattgcatttggattggaaattggatctaattgtaaattggatccaagagtaactggattgtttgtaatacaaatgataaatgcttaagggaatgagcaccccgttctctatgatgtgattattccacattgcatgcctgtatcgaaacatctcatgtaccccataaatatatacacctactatgtacccataaaaattaaaataaacaaatttttaaaaataaaataaaaaagaattcaggaaaaaccaacacattctcagatgaaggaaaactaagagaatttgttgccagcagacctaccctaaaagaatagagaaagggagttattaaaacagaaaagaatggtaaaagaagggaatctggaacatcaggagaaaagaaagatagagaaggaagaaaagaaaaggagaaagagggagggaggagaggacagaaaaaggggagaggggagaggaaggggttttctttttcttcttgagttttctttccctttttttccagaggatcttcacacctctaactgaattttctaaattacatttaatagttaaagtaaaaattgtaacactgtctgatgtgattctcaatgtatgtaaagaaaatattaagacaataatattataaatgattataaatgggagaagataatggtattaaagggaggtaaggttttttttgtttttttttttttttaactgtgtcttgttctgttgcccaggctggagtgcagtggcacgatctcagctcactacaacctctgcttcccgggttcaagagattctcgtgcctc[134 bp omitted]tcgatctcccaatgtgctgggattacacgtgtgagccactgtgctgggcctggccctgaggtaaggcttctatattttgtttgaactggtaaaacgtcaaaaccaataggctgtgataaactctatacataatacctacagccattgctaagaagtctatacaaagagacacactcaaaaacattacagataaataaagtgagattctaaaaaaatattgatgtgacccataagtaggcaagaaaaaggaaacagaaaaacaaaaaaccaaaaaacaaacagaagacaaaaaaaatgaattggcagacctaagtcctaacataacaataattacattaaatttaatagcctaaatataccaattaatggatttatatttacagactgtattttttaaatgagccagttaaatgatagccacaacaaaattacttcaaatattatcatacacacaggttgaaaaggattaaaaaaaagatatactatgtcaatattaataaaaggaaagcaagaatggttatagtagcatcagataaagaacagagcaaagataattagcagggacggaaaggaacataatgatagtagagtcgctccaccaaaaagatgtggcaatctcaaatgtgtacacaccaaacaacggaactacagaatatgcgaaggaaaaatggacagaactgaaatgagaaacgcataaactgacaattacagtttgggacatcagcactactctcaactattgttagaacaactagacaaaaaaaaaaatcagcaaggatagaagaattcaacaccaccagcaatcaaggtctaattgacattgacaggacatttaatccaacaacagcgaaatacacattctttccaaacattcacagaacatatactaaaataaaccatgtcctgggctagagaacctcaacaaacttgaaagaattgaaaccatacagggtgttctctgaccacagtggaatccaactagaaataactaacaggaagataagaacaaaatctccagatacttggaagctgaacactacacttttaactaagccacaggtcaaagaaaaagtcttgggggaaaacaaaaatacattgaactgaatgaaaaagaaaacacaacacatcaaattttgtaggatggaactaaagcggtgcttcgagagaagtttatagcacaaaaatgcttacagtagacaagagggaaagtatcaaattggtcatctaagctcccaactcaagatattagggaaaaaaaaaaaaaagaaacccaaatcaaacagaagaaataaaatagcaaatggcaaaaatcaataaaattgaatagagaaaaccaacaaagcaaaaagttggttctggccagtcacggtggctcacacctgtagtcccagctagtcgggaggccgaggcaggaggatcacttaagcctgggaaactgaggctgcagtgagcagtgattgcaccactgcactccagcctgggtaacagagtaagatcccctccccctaaaaaagatggttcttacaaacaatcaaaattgatgaacctctagcattattgagaaagaaaataatgaaattacttatcaccaatttatcagaaaattaatcaccagtgtcaggaaagaaacagtggatatcattacaagccttgctgacaacaaaatgataataaaggattgaaacaaaacagctctacacacataaatctgataatttacataaaaagaactaattcctcaaaaaagcaaaaactactgtgtccggacttggtgggttcttggtctcactgacttcaagaatgtagccgtggaccctcgaggtgagtgtttcggctcttaaggtggcgtgtctggagtctgtcccttctgatgttcagatgtgttcggagtttcttccttctggtgggttcctggtctcgctggctcaggagtaaagctgcagaccttcgcagtgagtgttacagctcttaaggcagcgcgtctggagttgttcgttcctctcggtgggctcgtggtctggcttggctcaggagtgaagctgcagatcttcgcagtgagtgttacagctcataaaagcagcgtagacccagagagtgagcagtagcaagatttattgcaaagagcgaaagaacaaaacttccacagcgtggaagaggacccgagcgggttgcctatgctggttcaggcagcctgcttttattctcttatctggccccacccacctcctgctgattggtagaaccgagtggcctgttttgtcagggcgctgattggtgcgtttacaatccctgagctagatacaaaggttctccacgtccccatcagattagttagatacagagtttccacacacaggttctccaaggccccaccagagcagctagatacagagtgtcaattggtgcactcacaaaccttgagctaaacacaggatgctgattggtgtatttacaatccctgagctagatataaagactctccacgtccccaccagactcaggagcccagctgtcttcacctagtggatctcgcaccggggctgcaggtggagctgcctgccagtcctgcgccgtgcgctcgcattcctcagcccttgggtggtcgatgggactgggcgccgtggagcagggggtggcgctcctcagggaggctcaggcacggcgggctgtaggtcccgagccctgccccgtgggaaggcagccaaggcccggagagaaatcgagcgcagcgccggtgggccagcactgctgggggactcagtacaccctccgcagccactggcccgggtgctaagtcccccattgcccggggccagcagggctggctggctgctccgagtgcggggcccaccaagcccacgcccatccggaactccagctggcccgcaagtgccgcacacagccccggttcccgctcgtgtctctccctccacacctccctgcaagctgagggagtgggctccggccttggccagcccagaaaggggctcccaccctgcggtgggggactgaagggctcctcaaatgccaccaaagtgggagcccaggcaggggaggtgccgagagcaagcgagggctctgaggactgccagcacgctgtcacctctcactaccaccactaacccaatatgaaatagagaatttgaataaccctacaactattaaggaaactggtttttaaattttaaaactcctgaaaaggaaatctccaggcctcaatagtttcacatgagaactaccacttgatccagcaatcccactactgggtatctaccaagaggaaaagaagtcattatacaaagaagacacttgcacacacatgtttatagcagcacaattcccaattgcaaaaatgtggaaccaacccaaatactcatcaatcaatgagtagataaggaaactgtggtatatatatatatatatatatatatgtatatatatgtatatatatatgtatatatatacgtgtatatatatatatatatatgatggaataatacagagtcataaaaaatgaattaatggcattcacagcaacctgggtgggattgaagactattattctaagtgaaataactcaggaatggaaaaccaaacatcgtatgtcctcattgatatgtgggaactaagctatgaggatgcaaaggcataagaatgatacaatggactttggggactcaggtgggggaaaggtaggaagcggatgagggataaaatactacaaagtgggttcagtatatactgctccggtaatgagtccaccaaaatctcacaaatcaccactaaagaacttatactacctattccccaaaaacctatggaaataaaaaaagataagaaaaaaaagtaaatgtgaaaatataagctacagactaggagaaaatatttgcaaatcataaatctaataaaggacacctatctagactatacaaataactctcaaaactcaacagtaaaaacaaaaccaaacaacaatctatatttttcagtgaaatctctcttcacggtaccgcacagtcatgattactgtagctatataataaatttggaaatcagggagagtgctacctcctactttattctttttttttcagaattgttttagttattcagttcttttcctttgcacacaatcttctcttcatcgaagagcgatttcactgaaaaagatacacaaatggcagataggcacaggaaaagatatttaatcaacatcattagccattagggaaaagcaaagtaagaccacgataaaacattaactacatacctattacaacgactaaacttgaaaacaatcacagcgacgatatgaaacactgccaaggatgcagggacactgcatctcccacaccttgctgatggagatgtaaaatggtgcagccacttgggaaaatagtttggcaatttctttaaaacactaaacagatacttagcatatgactcagccattgcacccctgagcattatcccaaagaaatagaaactcaagccaggcacggtggctcacgcctgaaatcccagcactttgggaggccgaggcagcagatcacctgaggtcaggagttcaagaccagcctggccaacatgacaaaaccctgtctctactaaaaatacaaaaaattagccaggcatagtcgcaggtgcctgtaatgtcagctactcaggagactgaggcaggagaatcagttgaatccgggaggcggaggttgcagtgagtagagatcgcaccactgcactccagcttgggtgactgagtgagactctgtttcaaaaaaaaaaaaaaaaaaaaaacagatccacacaaaatcctataggtgaatgtttatagtagctttatttgtaatacccaaaaaacaaaaacagccaagttgtctttcaataactgaatgattaaacaaactatagtacgtggaaaagtgttcagtaataaaaaggaacgaactattgatatataactacatttgacccttgaacaacttgggctttaactgtgcaagtccacttataagcagattttcttctgtctctaccacccctgaaacaacaaaactaacccctcctcttcctccttttcctctgcatgaaaacaacggggatgaagaccttcataatgatccacttccacctaatgaatagtaaacatatgttctctttcttatgagtttaatacatttttctagcttactttattgtaagaatacagtatataatacacagaacatgcaaaatatggctttcattcaacaataagctattagtaattaaattttgggggactcaaaaattaatttcaactgggcggagttcagcacccctaatccccgcattgtgcaagtgccaactgtatttgaatggatttcaagggcattatgcatgagtaaaatattgaagtcgctcgcaaaaggtcacatactgtacaatcccatttatataacatccttgaaatgacaaaattatagagatggaaaacaacttggtggctgacaggggttagggatgggggaaaagagggaagtgggcgtgactatgaaaaggtggcaccagggagaactttgtggcaataaaaccgttttgtaacttgattgcagtggcgtttacatgatcatgtgatcaattgaaactacacacacacacattgcaccagtatcattcctgattgtgatgttgaactatagttatataagatgtattcattgggggaaactggatgaaaggcacatgggatctctccatgatacaatttctttgcagcttcctgtgaatctataattacttcaaattttaaaaagaaaagcaaaattaaagattttacaaattaaatctgaaaggaaattaagtgttaataattgcctctttgggaggtggaagtacatgaaatttttctgttttgcatgcaagtattttctataatgaacatatatgttactttgtttttatcacagtaatttaaaaaaaaaaatcttcctcaaaccatggtcatgagaggtctactcagctgcttacatgttcccctccagtgacggcacaggggatggcctctcctaaaacaaccctaggaggatggcctcacagatgagggaagtggggagagcagagcatctcctggctagggacctctgagttatgcagcaagcatcaaccatttgcaacaaaaaaaaccatgagaaacatacacttattcacaatgctggtaggaatgcaaaattgtatcattgcaatgcagtggggatggggaatatctaacaatttatgtatggatctgcttttcaaaccagttaccctatttctagggagttcacctgaagaagcacctctggcaatatgaaaacacatgtccacgaagttattcattacaacactgtttatcactgcagaatattggaaaccacctacatgcccaagcataggagagtagctgaatgaattatggtacctctacacaatggaatgctgctgtaacaaaagaatgaggaagatctccatggcctgataagaagtgctttgcaggacattctgtcaagcgaaaaaagcaaattgcagaagagcatatagagtatgctatcggttgtgtaagaaggaatgatgaaacatacacatagctatttatctttacacacacacacgaaggataaaccaggaagaaatgaagttggttacccgtaagaggtgagaggaaaataaggtggaaggaatataggagggagtgacccttctctgaaatgtctttataacgaggtttgacttttgaaagcacgttaatattctaaatgttcaaaaaataaaattaaacaggaaaacaaactaaagcaaattaacctaattgtatttcaaatgaatattataattatactgaaggggaaggaaagaaggaaggaaggaaatgtgagagggagggaaacagggaaggagggggtaataaatgaaaggactaactctagtaatttacgtatattttactatatacccatagtctttaacagggttggaggatgggaactgcaaacaaatcctgaattcattttagtagaactgttttttgtagtggtatggctgatgcaattgtaagactatgttaaatatattatactgttataatgtatatagatatatcaaattattatattaagcaaatgagtaaatgtgttaatgttgggagccagtattctcactgtggaagaagggacatgcaaatgggaaaagcaaaaaagaacctggaattaggagtggtggtgtaaatgcatgatttctaaaatatgcataattatgtgcatatatgggcatatgtgtatgtctgtgtgtacacatgcacacatttttctagttctatccactgaaagagcctaaaagcaaagacacacaagtagcacctagctcctagatctttggtctctaataccattccatgctaaaaggaagcagtgctctccagagaaatgacttattcccggagaggagcagaatatgtacaacgtgagccctgaatatcttattatgccagacacagagtgtttttaaaaaatcagcatgtcccaagggagatgaaaagggctcccactagtcaacttcagaataatttaagcacccaaatattaagtacagtaacaagttataaaccatcagaaaatagaaattaatgagtccttactgataatagataataggtagatgatagatagataataggtagatgatgatagatagttttaatttttaaatggggaagtatattcttt[137 bp omitted]tatagcgagaccacatgtcaatgaaaaataaaattttggctgggcacggtggctcatgcctgtaatcccaacactttgggaggctgaggcaggtggatcacctgaggtcgggagttcaagaccggcctggccaatgtggcaaaaccccgtctctactaaaactacaaaaattagctggacatggtggtgggcacccgcaatcccagctactcaggaggcttaggcaggagaatctcttgaacccaggaggcagaggttgcagtgagccaagatagcaccactacactccagcctgggtgacagagcgagactccatctcaaaaaaaaaaaattatttgaaaaaagaaaacttttacaaattagatgagtgtagtggtgcatgcctgtggtcccagctactcaggaggctgaggcaggaggatctcttgagctcagaagttggaggctgcaatgtgctgtgatcgcaccactgcactccagcccagctgacagagcaagaccctatctctaaattttaaaaaaaaattaaaaagatgaattttaaacaagaaagactgtgggaaagtttcagattaaaagagagtaaagaggacacaaaatccagtatctgactagagactggatcctgtactggatgggggaataggctataaaggattttattgtgccaattgacaaagttggaatatggatgatagagcacataaaagtattttatccctggacatttatgaaggtgataactgtgggtatgtaagagaatatctctgttcttaggaaatacatactgatgtatttaggggtaaagagccatgaagtttgtaatttactatcaaatggagggaaggaaggagagagggagggggagacagaagggggagagagagcacaaatgataaagtaaatgagaacaaatattaacactaggtgaatctgaataaagggcatacgggtgttctttgtactctttatttttgcaacttttttaaatttgaaattatttccaaataaactgtttcaaaatgttattatagaaaaaacaaagtagccctcagaaaatgtttttcccctaaactcccatcaaccacttgggagtgctcacttcccacacccttggcaacattgattagaatcacacttgaaaagttttaacaggcttatgagtaagggactgcctttattactagtgagattgaacatcttttcatatcatgattgaccttttatatttcttcctctgcaaactgattatccaaatctttctcctgtttttttctattgaagtattttttcttattgatttgtagaaactctttatatattgtatatattatacaaggattttatgtgataattacttaaaaggattagcacagggaaggatacagaataattactcagaagaaggatgatttgagcattgttactttaataatgaggtgggggtggtaatatttaaatacttaaatgtaaataacactgtaacgtagtactcaagaacatgggctttagggttaagcagagactgggttcaaatcccagctccatgggtgccactggccatgttgttacgctccctgagcctcagctcccctactcataaatcttatctaaaagttgtaatgaagagcccatgacattctatctgcaaaggatatacaatacttagtacacagaaagcactttctaaatgctattattaattttgctaccagagagcctccctgctgcttcccaagggtaatccttaccagagacaagtagcatagcatgatggcaactgttttcaccagaagagatgagatgcagggtgtagatgccattgtcagatgcacgcacatcaataatgatcagggagccatcagctctgcctgtttccctgccagtgtgggctggtcctagggtgtagccatggctgaagaagttaaaattgaggatccgggtaacctgattggtggttgctcctcggagccaattgtaggagatgagattctgagggatcccctggacagacagggtgacgttgccccctcgacggcccagggagggatggatgtgatcgtcagctgagcagacacctgcttcttgcagaggctcaggaagaaggcaaagggaggaagcaaagagcactatcacagaggccacttagcagcattcgacagtagactcagccactgctagagtctcactcatcggagttaaactgtgggagtgggaagagcatgtgcaaaggccctgaggcaggaggaagatcattgtttttgagggaaaagcagggaagccagtgtggttggagttgagtaagtgaaaatgaaagaggtaagagataaagtcagagaggtaagagagacagatcacacttacaactggcattgacatttttggcaagacaattattcatcttgtggatccgtcctgtgcattgcaaggagtttttaacaccacttgctctccctactacaacagcagcagctccttccaggcattgagacaaccagagaacattcccacacattgtcaaatacccgctagggggcagtattagctctggtttggaacatcatgcaggctcttgcagataattatacgagtttttttgtttttgttttagtttttgtttttgtttttttgccacagagtctcgctctgtcactcaggctggagtgtgccagcttgatcatggtttactgcaacctccgcctcccgggttcaagtgattgtcgtgcctcagcctcccgagtagctgggaccacaggcatgcgccaccatgcccagctaatgtttatattttttttgtagagtcagggttttgccacgttgaccagactggtcttgaactcctgggctcaagtgatccttgtgccttggcttcccaaagtgctgggattataggcatgagccaccgcaccagcctgtaaggacttttcgttgtattctgagggagtcagagaaccactggagagttttgagttaaagattaacacgatgtaccttatattctgatcattctggctgcagattgcattgattttggagctcaagggtagagttgcaacattgctcagctccacgaagtgagctgccattcacattgtagttaatgcaaatgctacttccagcaactgtgcagtgcacaacccatacagctatatgtggtgaccccaggcaaggcagaagcaggagacaccatttaggaggtgactgcaacaatccaggtgagagatatcagtggggaagaaaatcagaaattatgatccgtaactgttacctgcaagacagagccatgtccaaagcccaccacctctgcagggaccttccaaggggccagccctgtttctttgatgcctcaccagtctagctgtccttctgcctcctcccagctggaggccaggcctaggggaagttcaatagtgtctgaaaagccccgccctctatagggtctttggttttacctcctctcagaagacagcccatcagtactgctccctggatcccactcccattcaccccagattccacactgagagtttggggcagggtccactggcaccagtttgggtcttaccaattctacagattcctccaggctctgccatcacagaaggtccagccccagtgctgctttggccagaaagaatgcttggcactgcatttgctgacaaggagtgtggcctgtgtttatcccagaggtgggtgaggcagcctctgctggttccagaggtcccctctgccacctgaggcgccagccatgcagtgctggtcctaggtggggttacagaggtattgacaccagcctggtctctgggttaatttttgttaagggcctgcgacccagtgtggaggggttgatattgcgcagccttgaaggacgtggacatgagcttatcagaacaagtgatagcaagataaaagatcaaagtaggctctttgcctcagattctgcatggcagcaatttccaccagcagggtccaaagacccaaaatgaacaaggaaagcaacctcctgaagggacacttggtaatcaccttgatctttggttttcaaagtctgcagtccacttggaaagcaaggtacaggggcagagagagttgacaaatatgtactgcttgatgaatatggaagaaacaaagaaaacagaagtttgaaaaccaccgacctagaatttttaaatgacgacacccagtgctagcgatctctggagaacagttttgcaagatgcatccaaaaacatacacatgtacactctctttgaccccaccgttcctcttacatttatcttaagataatcattatagatatgtgaacatatttacttctgggataatcatgacagcattgtttatagcaggaaataaagtggaaacaacatatattctgtctgcagagaaacagaagcaatctattctctctctctgtgtgtatatatacgtgtgtgtgtgtgtgtgtgtgtgtgtgtaaaatacaacaacaaaactgttcaccaatgatcaggtgctgtcctgttacatggtgaacgcattttatctttcccacagtcctagaagttagatacaactatcatcatctccatttatcatatggagaagttgagacacagaatcactggcccaaagtcacatggatgataagaggcagaaccaggatttgaacctttgcaggctggatccactgttcatggtccttcccattccactgttttacctctcaaatttggaaacattattctacctgccagttgttcagcagttactatcgccaggcatacactgaattatctcagttaattctcactccatgaagcaggatctcttgctgtccccattttatagatagaaaaactgacgctcagagaagaagagtcatttgttcaagtcatacagttagtaaatgacagagccagttacgctgcaagttacccagatttcaaggataagcggtatgtagtaaaaatacatcatgctatgagaattagagatgttcttctgaagatctgatgtttcatctgtgatctaaaggatgggtcagaattaagtagacaaagacagtgaggaagagtgtaatgactggagctccagcagccattctgaatgacgaactgacttaaggaaggaagctatgtctgatataatggaacagaaacatagaaggagcttgcgtggaacaggaatcaaaagaaattaaagactgtctaagcaaaaactcagttgtatgtaagaaaacccaattccccttgaggaagagaaacagctggagtcctttaaaattaactgcctgtttttctgtctgtggctagtgagccttatcgctccctttcccaggcattgtgaagactctttctctagctgtgcagctgcaaggtcattagacagataatctcaagtcgtaaaacatattattccttgaaaagtaagaaataatgtaatgcatgtcttaactgaataactgtttttaattcttgcttctgtaatacgcttccccctgcacagaactccccccaccccacgaaatgcttaaaaggtagcttgactctttgttcggggctcagtcctttggatgttaatctgactgggtcggtgcacctaaataattaaataattcctcctcaaccccttggtccctctgattccttaattatcccacagcatgggtacctggtgaccatgaagtcaccagaccacactgagatgtctgtatcagttacttatcaccatgtaacaaacctctctaaaacctaggaacttcgagagacagacaaaaatgcacaagacttgttgtggcctgggctcaggactgccactttattatttctacctcattgttttggtcaaagcaagtcatgaggtcaaccaagattcaagggtacaggaaaacaggctccacctgtttgtgggagaagctgtaaagtcacattacaaggtgcttcgatacagagagtagagaatcggagccgtgtctgtgatcaaccaaccacaacttattttacatgagagagaactacactcctttattaactaaaccactgttatttgagtttctattttatgcagctgaaccaaatccccacctgacataaagagtgttgcaaatggagagaagagtgtaagcaaaggcccggtggtgggaggctcatgacacttcaaatcactgaaataagtgagggggtggatttcggggtgagaagataaagtcaggcaactgctgcccaccagcacggtgtttcctgctcttcccaagagagactcacacatttgacaacagttgttacccacgcatcaggtgggttcagacacttggcaggtatcaacccaatgactgcaaccaaagaggatttagcatggggattttattacttgcaacaagtaaagagcacactagggatagttcccaaagcagtaacctctctgagctggggtgccgcggacctattggactgaacaaagtggggcaaacatgggaataaaagacaagagacaaagaagtatatttggaagaaagggtcagggggcaccttgcctctagtggacaagcgccctgagctttacacggccctccatatttattaggcaaaagagatagtgagaaagtggggagtgattgtcgagtaattgtcagtcgggcgtttggttcacagcaggctttcgagattgcatcctttgagcaataggcgctaatattctcagtagataacttcaaggagcccggagcccgggaatgatgtccctcagcaaaccttttggtggcagggcagtgtgagtttgcccacatcctgcattcatgataaacagtttgttatttgatcatatagcctccagcggaatgctgagttggtcacgatccctttggccttttcggctcccaacactgggggcagggtcaggatttttataagcatagggtaaggaggcatgatgtgattggatcttgcaatgaggtgatgccaggaggcatgatctgactggatcctgccatgatggggtgatgccagggcttgatctgattggctcctggatcctgccatgttatgtctgcttcttaattctgtccctgctccttggtccaaatgcttaggttcccctgtggttgcgtacttggttcacctgggcatgctcagtttatgtgacctgagggtccatggcaacctaaaaacaacttacaactttgttacataaaagttgaaccagattgtactgctacataatcacactgtaactcctggagcaggatctggttcaacctgcatttattaaacacatgatgggtggtggatctaatgctgcaggagttagggatgaaggcggggttccaagtgttaagaatttcctggccgggcgcagtggctcacgcctgtaattccagcactttgggaggtggaggcaggcagatcatgaggtcaggagatcaagaccatcctggctaacacggtgaaaccctgtctctactaaaaatacaaaaaattcgccgggtgtggtggcacggcacgcgcctgtagtcccagctactcaggaggctgaggcaggagagttacttgaacccaggaggtggaggttgcagtgagctgagattgtgccactgcactccagcctgggcaacagagcaag[211 bp omitted]gaggcagcagaatcgcttgaatccaggaggcgtaggttgcggtaagccgagatcgcgccactgcactccagcctgggtgacagagcgagactccgtctcaaaagaaaaaaaaaaaaaaagatgatcatgatggtttagggggttgaatggtggccccctaaaaaaaatatgtccacccaggacctgagaatatggccttatttggaaagggatcctcgtgatgtaattaagttaaagatcttgagatgaagtcatgctggattgtccagctatgccctaaatccaatgacaaagtgttgttataagagagagaagaggaaggccgggcaaggtggctcatgcctgtaatcccagcactttggaaggcagagatgggcagatcacctgaggtcaggagtttgagatcagcctggccaacatggcaaaaccctgtctctactaaaaatacaaaaattagccaggcatggtggcaggtgcctgtaatcccagctactcgggaggctgaggcaggagaatcgcttgaacccaggagatggaggttgcagtgaaccgagattgcgccactgcactccagccttgcaacagagtgagactccatctcaaaaaaaaaaaaaaaaaagacagagagagagagaagtggagaagacacggatacacagatacacagaggataaggccatgtgaacactggggcagggactggactgatgcagccatcagctgaataacacctggggccaccagaagctggaagtgtcaagggaggttcctcctagaacctgcagagggagctcggcctatgcacaccttgatttcaacttctgccctctggagcagtgagagaataaaatgctgttgttttaggttaacaagtttgtagtatgaggttggtacaaaagtaattgcagattttgccattacttttgcaccaacctaaataatttgccaaaaccaccgctggaaactagtatggatggtaacagaaacgtgtctgtgggaccagatagtgtaataggctgttcaggaggggaggtgatgagcttcctgtcacttcagggttaaggatggggaccttctcaggaagtcttgttttctaattgagatttcttccccatcagaagcatctcaaacctaaaagacattaggagttgcctctgttacatgtcgaatccacaaaccagtctcttcccttcttacctcccctccttcccaactggtatcttccctgcacacccctccaggcccctcttcctcaaacaccattgtccccaggacttcaatgtctaccctccccttggaaacctttagtaatataaaatcaccaaagcatcttaaaacaataatgcccagtgtgggcaaggatgttcagaaatgggcactctcatgtacatttcatggcaggctacattgccacaataatttcgaagggcaattttatgccatgtatcaagaattaaaatctgacttagctattttattttcaggaattcagcctgagaaaataacctgtgatgtgcaaaataaatttatacacatgacccttcctgatctatccattggccctgtccccagtcctgtcttttgctgatcacttgcttgaacagcacatgccattcagattaaatccacatcatggagaatgtgcactgtttttctttcctctgggctttttacatttgtaaattcctgccctccccttgccaattaactcctgctcttccttccaggataaattcagatgtcacctcctccaagaagcttcttggcctcctgggagcagattgggtacctcctcagggtccctaagtgccctcccttattgctcaaaaggcaatgctatggggtgattaacagggaagattccagagccagtctctgattctaacacctgctttacatggctatgtgactctgtgactctgggcaatttacccacatctctggctattctctctctctctctctctctctctctctctctctctctctctccttctctctctctctctctctgtcttttgagacagagtctcactctgttgcccaggctggagtgcagtggtgtgatctcggctcactgcagcctccgccccccaggttcaagtgattctcgtgcctcagcctaccaagtagctggaactatgggtgcacaccaccacactcggctaattttttgtattcttagtagagacaaggttcaccatgttggccagactagtctcgaactcctgacctgaggtgatctgcccacctcagcctcccaaagtgctgggattacaggctcgagccaccatacctggcctgttttctcttaaacacttattaatcgtttgctgtgtgccgggaactgttctgtgtgctttacaaatggcaattcattgaacctcccaacaaccctgtgaggcaggggttagagctacccattttgcagatgaggagactgaggccttgagagtttaaatggcttgttgaagttcacacagtgcaaattgcagagccaaatctgaatccatggcatcggcgactatacggtgctgcctctgggcctccatcctcatctggaaaatggggcccatagtaacagtgtcatatcgtttggatgtttgtcccctccaaatctcatgttgaaatgtgatccccaatgatggatgtgggcctagtgggaggtttttgggtcatggggcaatccctcatgaggctttggcgccatctttgcggtaatgaaggcattcacgctctgttcattcatgcaaaagctggttgtttaaaagaacctggcaggccgggtgcagtgacttatgcctgtaatcccagcactttgggaggctggagcaggagaatcacttgagcccaggagttcgagaccagcctgagcaacatggtgaaaccctgtctctacaaaaattaggcaggcatggtggcatacacatgtagtcccagctacttgggaggctgaggcaggaggatcacctgagcctgggaggcagaggttgcagtgagccaagcctgcaccactgcactccagcctgggtgacagagtgagaccctatctcaaaaaaataataataaataataaaaaaataaaggctgggcacagtggctcatgcctataatcccagcactttgggaggccaaggtgggcagatcacctgaggtgatcaagaccagcctagccaacatggtgaaaccccatctctactaaaaatacaaaaaagtagtttggcctggtggtgggcacctgtaatcctggctacttgggcggctaaggcagaagaatcactcgaaccggggaggcagaggttgcagcgagccgagattgtgccatcacactccaccctaggcaacaagagtgaaattccatctcaaaaaaaaaagagcctggtatctctcttgcctctctttcactaggtgatactcagcttccccttcaccttctgccatgatgataggcttcctgaagcctcattatgagctgagcagatgctgccatgcttgtacagtctgcagaaccatgagcctaataaacctcttttctttgtaaattacccagccttaggttttcctttatagcaatgcaaagcagattaattcacagtgcccccttgtagaggagctgagaggactagactgtttatgtcaagctcctggagcagggcctggcccatcctcagtgctcggtaagtatcagagagtatcatcagttacgggactatcctattttcctaccttctttatcgtttcatcatttctgttcatcatcgcctaaagcctcctgcctactattttccaggctctcaaaatggggtttctttgattttcatagcagcccgaaggggaagtacaatcattgccccattttgcaaataaggaaattaatcagagaggtcaagtgacttacctcagatcacacagatgacagaggtggagcaagaaattaatttggcttgtcctactcaaagattccctgccctgcaacttcccctttaagacatgattgtttaatagagtgagtctgggacaatgcacatttgtcaggtacgcaggctctgggaagctggaaatgggaccagccaagactagagctctgatataacctctgagaaatgccctccccaacctcagttctcagccacaccctcacctacgagcaacgctcccatccagggctcaccccagccatggggagcaaccaggaaccgggccatgggtcctttaggagtgcttcctcctagaaggacattggtttgcggagaacagactgcaagaaccccagagtgagccgatttgtgtgtcctgcccggagccctagcccagagaggagatggcccagccttctgtccccatgatgagggccgtgcccatggggcattggtggccagccagggagggactggcacagccctcttcggtttacaactgttcaatgtctcattaacttctcctctttggtcatgtctctggcccagcattcgtgccctttgctcttcccaatcatcctcatggtaggcaaacgtgggagggcaggggactgcatgctcccctcctggcttcctgctgtataaatggggaaacagaggccccaggagagcaagtgatccccccaggaccatacaaggagtctgaaatctggccctgactggattccagtctttggctcaagcctcagccagaagtctcatcctgcatatctggcccagtctgaagactcaggtgggagacaggaaatgaaaatcttcaggagcttcagggaggctcattggaaagaaaaggaaacttgtatttactgagaaaccagctttgccgatgcaacagcaaatcctgagctcagcgttcaaatttctccagaatccaaccacttctcaccagctccacccacaccagcaccatctcccacatggaccattgcagtagcctcctcactgggctccctgctcctgccctcctgctaacacctaagttgtctcatgtcccttgcctgctcagaggcttcctgtggcttctgtctcactcaggaaaatgcctaagtcccaacactggcctgcaaggtccatggtctggccccatccctgccccacccttatctcccgcttcctcccttactccccgctctccagccacactggcctctccactgttcatcaacactcagggcacagtcctgccccagggcctttgcatttgctttactttctgccccaaacactcttcccaagatagccacatggctttttccttcaccacagtcaggaccctgttcagatgtcacctcttcagagaggccttccctggctgtcctgtgtacagcctagcacttcctgtcccacctgtctggtttatttctttccaacacactcatcgccgtgtgacactctccactgatttgtgtttgttgattgctctccctaatatcagtcccttaaaggcagggatttctacctggtttttttaattctattttatttttttagagatgaggtcttgctatattgcccaagctggtcctaaactcctgggctcaagcgatcctcccacgttagcctcccaagtaggtgattctacaggtgcaagtgactgtacctggcccctctgcctgttttgttcactcttgtaaatgcccaaagcctagcgcagtgcctggcacatggtaggtgttcaataaatattttgtgaatgaatgtgtgagaccctgcactgagcagttgaatccaaattaagtgcaagtttccatccccatggccatcaggctagaacagagaggctcaaaaagccccccagccacacaccctataaggggaggagttggtatttggacccacatctaatgccaaagcctgcattcttaaccactgcattacactgctcctggatttagggattttactgatgagacccacagaaagtgtaatagccatccccactgatgcccctcccttagttaacgaagaaatctcaaagataagaatcaaagggccaggcggggtggctcatgtctgtaatcccagcactatgggaggctgaggtgggtggatcacctgaggtcaggagtttgagacccagcctggccaatatggtgaaatcctgtctctactaaaaatacaaaaattagtattggcatgcctgtaatcccagctacttgggaggctgaggcaggagaattgcttgaagtggaggttgcaatgagccaagattgcaccactgcactccagcctgagtgacaagagcaaagctccatctcaaaaagaagaaggagaaggaggagaaggagaaggaggagaaggagaaggaggagaaggagaaggagaaggaggagaaggagaaggagaaggggaaagggaaggggaagaggaggaggaggaagaaggagaaggaggggaaggggaagaggaggacgaggaagaaggagaaggaggggaaggggaagaagaagagtaaggggaaggggaggaggaggaggaagaaggagaaggagcggaaggggaaggggaagaagaagaggaagaggaagaagaagacgaggaagaggaggaggaggacggaaaagaagaagaaaaaagaagaagaaggaggaggaggaggaggaagaaagaagaaagaagaaaagaagatgatataggaaggatataaggacccagagcaagcccaggcacaagcagatgccttgaatattcttcccaactctgagctgagacgtcgtccccgcttggccgagggcagctctgccccctgttggtcactcatggcaacggccccattggtgtcccaggacaacagcgttgacaaggataacccaactggcaagtgctcaaaatccctaatatacacagagttcctgaaaagcaacaggaaaaaaagagacaatgcattttttcttttagatatagggtcttgctttgtcacccaggctggagtgcaatggcatgatcatgtctcaccacagcctagatctcctgggctcaagtgatcctccagctacagcctcccaggtagctgggactacaggcctgtgccaccatgctgggctaatttttaaaactttttgtagaaatgaggtctcactatgttgtccaggttggtctcaaactcctaggctcaagcaattctcctgccttagcatcccaaagtgctgggattcaacacaattttttaattggcaaagtacatgaataggcaactcacagaggacatcatcttcaaatgactatcaaacttaagaagagataggcagcttcactagcgatggaaatgtattttaaaaccaccttgggatacgaatgtttatatgtacatggagcaaaaaaaaagtgaaatattaattatatccagcaacaggaaagagaactgttataaacactgttcaagtatttggtggccattcactggcactggcttgtacccctgctgagcttgggggacaaggagccacagtgcggagctttgggcgtcccagtccacacttctgcctctgcactctcttattcccgtgtgtgtgtatccctctgttgtaacaccctagctctcagcaagtgacaggaaagagtctaaaaggcaaagttagggacaggacaggaccctgcacctgtgttaatcacaccccttcaccctccaacagggcagaagcaactctcaatgctatactgcctgtcctagctttggctgccgttttttttgttttgtttttgtttttgtttttgtttttgttttttgaggcggagtcttgctctgttgcccaggctggagtgcaatggctcgatcttggctcactgcaacctctgcctcctggggtcaagcagttctcctacctcagcctcccgagtagctgggactacaggcgcctgccaccatacccagctaatttttgtatttttagtagagatggggtttcaccatgctggccaggctgatcccaaactcctgacctcatgatctgcccaccttggcctcccaaagtgctgggattacaggcatgagccacagcgcccaggctgactgctgttttttaggctccctgtggtggtggggagtgtaggggttggtcaggtaatgctaatggaaaagaagggcagaccccaaatctctccccacccgtggcaccagtctttctacaatgggaatgctcccacccacgacttcaccctcatccagaacccaaccaccttctgttgcctcattagtcctgcttccagcttctgaggcatctccagggctagtgcaggggaaagagccagcagaaaggcctggactgccgtgatgcattttaccttgtttgtagacatggactgaaaagctgcaagaccagcaattataaatgagaataccagctaacctgtgagtggttactctgtaccaggcactttgctaggcatgccacatacatgatctcctttaataacataacccatgataacccatgataggccaggtgcggtggctcatggctgtaatcctagcactttgggaggctgaggtgggtggatcacctgaggtcgggagttcaagaccagcctggccaacatggcaaaaccccatctctactaaaaatacaaaaaattagccaggtgtggtggcaggcacctgtaatcccagctactctggaggctgaggcaggagaatcgcttgaacccaggaggcggaggttgcagtgagccaagatcacaccagtgcactccagcctgggtgacagagcaagactctgtctcaaaaaaaataaaataaagtgaagtaacataacccatgaaaaacctatatcgtaatctctgttttacaaaagaagaaacagatgctcagcgaggtatagtaatttgccaaatgtcactctgctagaaaatagctgagccagaattcaaacccagagcttgtactttgaagcatttccaatttgctctttgaaccaatttggaggctttcatttctggaagccaggctgttgacagctttcacttcttatactttttcccacctagaaaggtctggctgggtgcagaccaaatatgattctggtgtcaatttgaacagactgaactcaagtccacatggacccttcaggatggtccaactgggagaagccctgagggtcacacagaagggcctctccaccttcaacaagtctcctgaggatgagggcagtgcacttaccactcagcaaagccacacatgcatcctcattagaggggcaccctctctgctggagaaccggcaagtctcaaaattggggcttagtccaggagggttcttgcctttgcccaggaaagaattcaagggtgagctggtggcgttagacagcaatcttttattgcacagtactgctccttgcagagcagggctatctcataggtaatgtgctcagagcaggcaaggtagggactgttgccaactgtatttatacccacttataccaactttcacttacatgcaaattaaggggtaggtcaatgcaaatcgagaggtgggtcatttagaattttctaggaaaatggtggtaaattccgggtgatttccacacatttgtaaactgtcatggctctggtgagaatgtcttgtgctaatgcacaatgagggcagctaaggattgcttttgttgccatctgctggttcctgccagttttttcattctgtcccttcaggactgagaaataagtcctgccaacctatctcctacctcatcttttcctcagcccagtcggggatggtgggtgactaagaaccagactggttggaaaaacatgctgtgatttaaacctgtaatctcattctggatttttatagcagacaagccagttggacatgcccagtctttttgccataaaaccccaatgtgcaagggagaccagaccaactccattctagctgaggagcccctggctgggctgcctctggtccatattttgcatctccttatatcaagtctgagcattgtcttccaacccacggagttcttgaatgatggagcccagcctcttgatgggtattggcactcaagctgggctcctgggaaccccacatggccgcacccctctcccatgatgggggagaatctcctccctggaccctccctgtgggggcatcagaatctctggggcagcaacagggctggaagagaagcctggacttctccagaaactgtgtctgtatggccagcacatgttttcacttcccatgggtatttatatgagtgaagggcagatatagagtattaagagaataaggatcctaaaagcctccttggagtcaccaaggtcctccacagtccctacaacctttaactcctcagctcccctcacccagggaaattccagtcaaatagactgaaccacacaagtggccaaataatttcagggaagtttaaacccctttcagatgcgctagttgatcatatcttgccagttatcctcaagctccccaagccttccagccacctccaataacttcatagaaaccactggttgctaatgatcacggagtcctggactcctttgaaaatgcattgaaagttgtgtgatcctggactgaagcttcaggcccttcctcagaatatgcagatgtatgcacaatgcttcacacaatgtcagggatcctttccaaggaaatttacacccagacatatcatcatccaactgtggaaaatcaaacacaaagaaaaatctcgaaagcatccagagaaaactaaacacatcacttataccaaaacaacaattcagatgatggcagatttctcatcaggaaccatagtggccagaagaaagtggcactttttttttaagtgaaagcaaatttattaagaaagaaaaggaataggccaggtgcagtggctcatgcctgtaatcccagcactttgggaggccaaggcagtggctcacgcttgtaatcccagcactttgggaggccaaggcttgaggccaggagtttgagagcagcctgggtaacatggggaaaccttgtctctacaaaaaatacaaaaattagctgagcatggtggtgcatgcctgtaatcccagacacttgggaggctaaggcatgagaatcaggaggcagaggttgcagcgagtcaagatttgccactgtactccagcctgggccacagagcaagactgtctcaaaaaagaaagaagaaagaaagagaggaagaaaggaaaaaagaaaagaaagaaagaaagagagaaacgaagaaagagagagaaagagaaagaaagaaagaaagaaagaaagaaagaaagaaagaaagaaagaaagaaaggaaggaaggaaggaaggaaggaaggagggaaggaaggagagagagagaaagaaagaaaagaaagagaaagaagaaagaggaagagagagagagagaaagaaagaaaggaaggaaggaaggagggaaggaaggagagagagaaagaaagaaagaaaagaaagaaagagaaagaagaaagagaaagaaagagagaaaaggaataaaagaatggctactctataggcagagcaatggcatgggctgctcaactgagtacacttacagttacttcttgattatatgccaaacaaagggtggattattcatgaattttcctggaaaggggtgggcaattcctggaactgagggttcctcccctttttagaccatataaggtaagtgctagatgttgccatggcatttctaaactgtcatggtgcttgtgggcatatcttttagcatgctaatgtattataattagcacataaggagcaatgagcatgaccagaggtcacttttgtcgccatcttggttttggtgggtttggctggcttctttaccacatcctgtttcatcagcaaagtctttatgacctgtatcttggtggcacattttttaagtgctgaaaggaaaacaactgtcaacccagaattctgaatcaagtgaaagcattctttaggtttaggagtgaaggtgaacattgaggttagctcggtttcaccttgaatatgtcttaaatcccctatgcatgcagtgaatgtggttttatacataaaatgttgtacagcagtagctgtatgcatacttacagtgtgtacagagatgctcagtacccaacaggacaaatctgcaaaatacagcttcaccattgagccatagatggagctgctgcctcaaattagagctgtatttccacctgtttctatagttaaaatttcataaattaaatgtgtgtatgatgcaagtctactgcaattcctttactagagagaagttgcaagaaccaatgatccctgtttctttatattcatgccctcatctaattccttccccctgagtgtgggctgtacctagtgactcatttctaatgaatgaagtacagcagaaagtgatggctgtcacttctcagattgggttacaaaatggctgttgcttctattttcaacttctctctcactctgtcttgaatcactttctgaggggaaagctacctgccagtagcaaacaccatctgagtgagcttgggagcagaacaatcaccccataccctcatcccaagttgagcttttgaatgacactgcagcccccgtccagtagcttgatcgcatcagagggaaaagacctggctaagctgagcccagattcttgactcaaagagactatgagataacaaatgttttattgtcttaagccactacattttggagtaattagtcatacatcaataaataactaatgcaggtggccttctgggacacagaggaggatggagaaggttgaatatcagagagcagatcttggggacaaaaacacagagtcctcatcacaggttatcatgcgagcccagaaaacaagcatctaacatctcatcaataatatgttcccacacaccaccaatacttttaccaaaaaaagtactaatagctaatatttcagtttgtattttctaaaattgactccatatggctttcctttggtggaaaaggaaaaagaaaatttgtctctgtcattaacttaatgtgatgtgtcaaattttattttattttattttatttattttttggagcagggtctcactctgtcacccaggctggagtgcagtggtgcaatctcagctcactgcaacttctgcctcctgggttcaagcaattctcatgcctcaccctcctgagtagctgagattacaggcacacaccaccatgcccaggtcattttttttgtattttcagtagagacagggttttaccatgttggccaggctcgtctcaaactcctgacctcaaatgatccacccacctcagcctcccaaagtgctgggattacaggcatgagccaccacgcctggccaatgtgtcaaattttagatgaggacacagagaacaggacagaggacctgaactttaataatcattctcatatcaaatatggaaaccacgttgttacggtttaaatgcttgtctccttcaaaattcatgttgaaacttaataggcaatgtggcagtatagaaaggtgggacctttagggggcgattgggtcatgcaggttctgctctgatgaatggattaatccattcatgggttaatgggttaatgaattaataggttattatgagagtggcattagtagcctataagaagaggaagagagacctgagctagcatggccccttgtcatgtgatgccctgcactctatagactgcagagagtccacaccagcaagaaggctctcacgagatgtggccccttaaccttggacttctcagcttccatgactgtaagaaataagttccttttctttataaattacacagtttcagatattatgttataagcaacaattagaaaatctttaaatccacctgggacctggaagccccctctgcggcttcaagatgtcctgcctttctgagctaaaccaatgtataccttacatgtatcaatttatgtctttgcctataatttctgtctccctaaaatgtataaaactaagctataacccaaccacctgggcacgtgttctcaagacttcctgaggctgtgtcatggatcatgatccttaaccatggcaaaataaaattctaaattgattgagacctgtcttagatactttttggtttgcagctgcaaccaaatgtcagccagagttgctgtctcatctgaggctcaactcgggaaggatctgcttggaaaccagggcgttggtaagggagtagaccacccttcatattgtcttatgtccaatttctccctccaaagaaagaagaagtaaaaactaaaaggcagaaatgaaatccacaggcagacagcccggcaccacaccctgggcctggtagttaaagatcgacccctgacctaaccagttatgttatctacagattccagacattgtatggaaaagcattgtgaaaatccctgtcctgttctgttctgttctgattaccggtacatgcagcccccagtcacataccccctgcttactcaatcgatcacaactctctcacacggacctccttggagttgtaagcccttaaaagggacaggaattgctcattaggggagctcagtttttggagacgtgagtcttgccaaagctactggctgaataaagcccttccttctttaagtcagtgtctgaggggttttgtctgtagcttgttctgctacattggcagcattcaattgctaactggttgtaggactgaggatctccatttcttgctggattttgcccacatgggcctcccaacatgaccacttgtttcctcaaagccagcaagggagagagtctcctggaaagatgactctatgttacagaattgccagaggtgttcagaccagagcaactaacacaggagacagaaattatttaggcagatagtgagggcaaaagagctctcagcagaacttcccttctaacaaaaagtagcccaagaaatcatttttcctaacaaagagcagcctgaaaaatcgggctgcaaacataaataaggaagctagaagcttgcatgggggagagccagcagctgcaccaatagaaaagggctacctgggaggggaacatcacatactcggacctgtcaggaggtggggggatggcggggagagcattaggacaaatacctaatgtatgcggggcttaaaacctagatgacgggttgataggtacagcaaatcaccatggcacatgtatacctatgtaacaaacctgcatgttctgcactgtcatgcacgtccatgtgaagtgaccaccaaacaggctttgtgtgagcaataaagctttttaatcagctgggtgcaggcagactgaatccaaaaaaggagtcagtaaagggagataggggtggggcatgtttataggatttgggtacatagtggaaaattatagttaaaggggattgttctcttgcgggcaggggtgggggtcacaaggtgctcggtggggagctccagagactaattgtccaggagaaggaatatcacaaggtaatgtcatcagttaaggcaggaaccggccattttcacttattttgtggttcttcagttgccttaggccatctggatgtatacatgcaggcttgggctcagaggcctgatgtgcacatgtatcccagaacttaaagtaaaataaaaataaaaatagattctaaaaaagaaagaaaagggctacctgcggggcaggcatgtccaccatgaaagctcaatcttcccttttttgttagcaagtatacagtaagaaagaaatggataacattgtgcagctcaggctgaaaacccacctgcataataagactggggtgggggctgccagaaattcatgccctgtgcaaatggaacacctggtcctaaccagtttcttacaccctatgtagagcaggtactgcctccccaccagctcatctataaaaacccctgcatttcaccatggaccagcaacctatttttctgggaccccctctctgtaacagacagctattctctctcttttgcctattaaacttctgctgtcaacctcactcttttctttccccccaggggaaagtgtaaacgcagtcacccactaccacaaattatgcagtaacctcactctttgtgtgtccgtgtcccagttctccatggccgtgagacaacaaacctcaggtgtcacctcagaaatgaggccatttcacaacttcatcttgtacaggagctgggtaaaatagggctgacacttcctgggctgcattcccaagaggttaggcattcatagtcacaggatgagataggaggccagcacgagataggaggccagcacaagataggaggcaagcacaggtcacaaacaccttgctgataaaatgaaatgtggtaaagaagccagccaaaaccgagatggtgacaggactgacctctggtagtcctcactactctaattataacacattattagcatgctaaaagacactcccaccagcatcattacagtttacaaatgccatgacaatgtccacaagttatcctatgtggtctaaaaaggggaagaaccctcagttccaggaaatccctgcccctttcctgaaatactcatgaatgacccacaccttgcttagcatataatcaaagagtaactgtaaatgtactcagccgagtagcccatgccactgctgtgcctatggagtagctactctttattcctttacgttcttaaaaaacttgctttcactttattctatgaaaaaaataggctgggtgcagtggctcatgcctgtaatcccaggactttgggaggctgaagcaggcgaatcacttgaggtcagaagtttgagaccagactggccaacatagtgaaaccccatctccactaaaaatacaataaattagccaggcgtggttgtgcgcgcctgttgtcccagctacttgggaggctgaggcaggagaattgcttgaacccgggaggcggaggatgcaatgagctgagatcgtgccactgcactccagcctgggcgatagagtgagacactgtcacacacaaaaaaataaaaataaaaataaaaataaatgtatggactgctttgacgagtggaagaagttgggagtaatgccctcaactactctagtgaggtcataagacaaaaataaaataaataaaaatataaaataataaaatagaaataaatgtaaaataaaataaatacaaatataaaataaatgtataataaaataaatacaaatataaaataaatgtaaaataaaataaatacaaatataaaataaatgtaaaataaaataaaaatgaataaagtaaattaaaataaaaataaattattttattttatatgttgaaataaaaaggttttatatgttgaaatcctaatgcccaaggtgatggtattaggagatgaggcttgggtcagtgatgagatcatgagggaggagctctcataatgggattggtgccctcttataaaagagaccccagggagaccctcatcccttctgccatgtaagatccatccagtgcaccgagaactggggtgcttcaaaatgagcaaggatcgtgttggttctcagagccagatttggctccagcccctttagcattggtcctttgcctgctgagttccctcaaccaggcttgcctttccttctgttctgcactccccacccactcctgctggctggaactcagctgagccttcatagctgaacaacgagtgaatgaatgaatgaacaattgaagacccagcttcctgcttcaagcaggaagtcacccccagaacactgggctttcccatcttctggcccagatagcatcagtcttatctcctttactgaccataaatttctgtggggaaaagcaagagagatcagattgttactgtgtctgtgtagaaagaagtagacataggagactccattttgttatgtactaagaaaaattcttctgccttgagattctgttaatctataactttacccccaaccctgtgctctctgaaacatgtgctctgtcaactcagagttaaatggattaagggcggtgcaagatgtgctttgttaaacagatgcttgaaggcagcatgctccttaagagtcatcaccactccctaatctcaagtacccagggacacaaaaactgcggaaggccgcagggacctctgcctaggaaagccaggtattgtccaaggtttctccccatgtgatagtctgaaatatggcctcgtgggaagggaaagacctgaccgtcccccagcccgacacccgtaaagggtctgtgctgaggagaattagtaaaagaggaaggaatgcctcttgcagttgagacaagaggaaggcatctgtctcctgcctgtccctgggcaatggaatgtctcggtataaaacccgattgtatgctccatctactgagatagggaaaaaccgccttagggctggaggtgggacctgcgggcagcaatactgctttgtaaagcattgagatgtttatgtgtatgcatatctaaaagcacagcacttaatcctttacattgtctatgatgcaaagacctttgttcacgtgtttgtctgctgaccctctccccacaattgtcttgtgaccctgacacatccccctcttcgagaaacacccacagatgatcaataaatactaagggaactcagaggctggcgggatcctccatatgctgaacgctggttccccgggtccccttatttctttctctatactttgtctctgtgtctttttctttcctaagtctctcgttccaccttacgagaaacacccacaggtgtggaggggcaacccacccctacaatttcccaagcacaaacacgaggcctgacacatgtggacgtccccctctgcgtccccctcttattgaatttattttctgtgccagggactttacacgccatgtgtcactgagtgctcacaatgacacagtgaggtagaagttatcgtcatccttccacagaggaagaaagaggatcgtgtgcacaaagtcacctgcccaagacagttggaaggacaatgcaggtgtaagcctaggacattgatgtggagccccagaagaacatgtattctggccgggcacggtggctcatgcctctaatcccagcgctttgggaggctgaggagggtggatcacctgaggtcaggagttcgagaccagcctggccaacatgatgaaaccccgtctctactgaaaatacaaaaaaattagctgggcatggtggtgggcacctataatcctagctaatcaggaggctgaggcaggagaattgcttgaacccgggagacagatgttgcagtgagccgagatctcgccactgcactccagcctgggcaacaagagtgaaattccacctcaaaaaaaatattctataggcttatatataagcctatagaataggacagcttcactgtgtgctttttttgcagtgtgaaaaacatgctttcatgaagggattgactaagggatgtggagcagaggaaggaggaatgaggtgcgcctgggggtaggggcacttttagaagaggtcatagttaggggccagggacgggagagtgatcaccaggaaagaaaggaaagggagctgcctttgcgggcagccaggaggacttgagtggggcttaggaggaaggcagcactgggatatttgtttggccgacccattcaacagctattcccagacccgatggctcaggcttgtaatcccagcaatcagggaggctgaggcaggaggattgcttcaggccaagacttccggaccagcctgaacaacaaaacaagatggtgtcttgttctgtcacccaagctggagtgtactggcatgatctctgctcactgcaacctccacctcccaggttcaagagattctcctgcctcgcctctgagtagctgggattacaggcacatgtcaccaagcctggctaatttttgtatttttagtagagacagtgtttcaccattttggccaggctggtctcgacctcccagcttcaagtgatctgcctgcctcagcctcccaaagtcctgggataacaagcgtgagccactgtgccccacctcaaaaattcttttaaaataggctaagtgtggtggcgcacacctgtggtcttgggaggctgaggtaggagtatctcttgagcccaggagtttgaggttacaatgaagtgattgctccactgcactccaacctgggtgacagagcaagactatgcctcaaaaaaaaaaaaaaaaaattaacgaacactcctgccagttggaactcagctgagccttcatagttgaatgttgaatgaaagaattaatgaattaatgaagccaggcactgtgctgggtgctggagatgtggcagggtgcaggaccaagtccctgcccttgaggaactgacgtccagctgggagacagccaatgaacaaggcaaatgggtaaattacagggtctgtctgaggatggtcaatgccatggagaaggcaggaacggggaagggagatgagaaatgttacaatgctaggaggttggaggaggagatgcttgagcagacctggaggaggtgagggaagaagccagggcagatccgggagaggaccatctagacgggagggcgtcccagggcagaggtccacttggagctggagggtagcctggctgtgtgaggaacagggatagagggtgtggctggaggaaagtgagtgaggggagagggtaaaaagagagggcggagaactgcagggcgggagggggcgggtgtggattagacagtcactgtggactttggctttgactcagcctgagactggagcctttgagcagagaaggggcgagatatgatttaggctgtttgtttgtttgcctgtttttgagatagtgtctcactctgtcacccaggccggagtgtagtggcaggatcacagtattggctcaagcagcttcaacctcccagactcaggtgatcctcccacctcagcctgccaggtgtgcgcctgtagaaaatatctgcaaatcatattttttttctttctttctttcgttctttctctctttctttcttcctttctctctctctctttttctttcttctttctctttctttttcttcctatctatctctctctttctttctttctttacttctttccttctttctttttcttttgagaaagggtcttgctctgtcacccaggctggggggcagtggtgcaatcacagctcactacagccttaaactcctgggctcaaacaatcctcccacctcagcctcccgagtagctgggaccacaggtgcgtgctgccccatgcctggctaattttttagatttttgtgaagatgagttctcactacgttgcttaggctggtctcaaactcctgggctcaagaaattctcccaactcagccccacaaagtgctgggattacagatgtgggtcaccatgcccagctgcacatcatatttctgataagagattgatatccagaatatatagaaaacttccagaatacaactattttaaaaaaaaatccaatttttttaatgggcaaaaagaacttgaatagacatttctccaaagaacataataaatggccaataagtacatgaaaagatactcaactatccctaatcattagcggaagacacatctaaactacaatgagatattgcctcgcagctattagaatggctaccatcacaaaaacgaaaataacaaggattggcaaggatgtggagcagcaaacaaggaaaccttgtgtgctgttggtgggaacgcaacctagtatggctgttgtagaagacagtatggtggctcctcaaaaaattaaaaatagaggttgggtgtggtggctcatgcctgtaatcccagcactttgggaggcactttgagagagagagggacaatgagagagagaggtccctgaggggattggaacctctggttctgggtgtctctgtgctctcctgtcttggaactcatttataacaaatttccctttgtgtgtaaactgcctcaagttggactcctgccatatagacccaaaagaaccttaagagctacacctgccctgacaggatgcatcctgcattcctcctcccagagagagcattttgtcaagactagcttcagctgcaagtaacagaaaaccccaaaatcaaatggcctcaacaagatggaagtttctctttgacataaatggagtctggaggtagagagttcagggcaaatgtggcagtttcataatcctggggacacagcctccttcaattattactggcctgtcatcttcagtacataacttggggtccaagatggctgccagagctccagccatcatatccacattctgttcagtagtgaaaggattaggaacaaaagctatctttaaggccagctcctagtagcctcatataacacttctacttctatctattggccaaaagtcagccacatggccacacttagctccagggaacctagagaatatattttttgctggactcccatgcatccatttaaaaatcagggtatgtattaccaaggacatagaggatgtggacatcagaagcgtctcttccaaaaccttcttccttctgtagagatggtgggcatcctaaaccttcagcccctgagggtctctaaactgaaaagtttcctgacagacatttggagaactgattccaccaaaaactatccacagtgggccagtggatgtcactaacctggagcagatggcaacctggggaacaggcccaaggccaagcagccattaatcgccttttggagcccagccagaagaaactcttgataagaatcctagccccagccaggacaaggtccctgccctgcccagctgggagccaatgtgaatcaacaatccactcttcctgtgtggcagccagagggagtgtttacctggtgatcttcaggaactgtaaatggggtgagttccgatcttcttcacctccccaacccagagatgaaggatccagtcttgcacccccatctagacgagcccttatcttaccattgtcctcacccaaaatacacacctccacgaccaggggacaccattcacacagagcacaataaatggctcccaccaaggtgggcaaggcactggtcctgattctggtccacagccacctgggatgagaaggggatgtaagaactagattgagtggggtatcccccgctgtatccacttccagagaagggcagggcaaggtggagcaggatgagatagaacaataacaatagcttctatatatcattcacacaagatagattactcttgttacagcccaaatgacagggtcattgtagacaagcaacaggaagaatttggtggcaaatggcggacagtctaggagaagagcagagggcaacctggcccaggtagcacataactattctctcaggcatacctgttagggtcctgaccagctctctagatgagtgagaattgggagttgggagcagaaaccgttgggtattctttggacagttggagaaaagggaaagaagaatgggcatgggaccttgttctggccaatgcctagtgagaagaagtctgctgggggctgatgggagagattttattggatcttgaagagaactaggagcagcaattccccttttgtgtctctggatgcggctggccaccatcttggactgggagggaagtcaccatgagaggacaacctgttgaggctggggtaggaagatgaagaacctggatctttggtgttattactgagccattgtattaaccaaccgaggaactgccctttcattggaatccctgctacataagataatacacgtcagtgttttaaaccactttgaattgagttatccactttgtatggccaaaagcatccaaagtcatgtttgaggggctggttttctcgtctaaacacagccccggctcagttaagcataggatgggatgaggaacaggaacacaggaggcaaggaggaatgtccctgaaaatgtttgtaaatgtggggtcgacaccaagaggcagaggggaaactcaattaaaacttaaagactgcaagttgtcaccattgtagacgtctcagctttgcaagaagtcaagaattttccaaatgccactcttcaagagacaactgggcagatgtggatattattccaagatatgggaaaacctaatgtcaccattaacctttgaatgagatacagctgaaagtgacagattcttgagtccaaatgactggcccagattctcaggcgtcctagcacagcacaaccgaagttggcacttttctttcctactttgtttattcatcttggggatgcaaaacgctgcatgcatcatcttctatttattagtaatcctgttactcctatttctttcccatgttgtcacatttttaccgtattagagctgctgctttgttctcctctcaataccaaaaaatgtgattgcaagattttgccttgaaactctgggctgttgtaactcctggaaataaaaatctcagcagcataaaaaggagaaaatcattctctcttctgcaactatagaaaagcagacactctttccctcataaaaccttccttgtaaatgtggttctcacaaaggagtcctataagacacccagacttcagagactgctcttgctgcatcctgcaagagccacctctaacttcccaaagctgggctgattgtcttcatttctaatttgttattcctggtaatgacactcctttttcctaaaaagtacaaagaattatgagttttcattggccattctcccttcccctaccctcatagagctaaaaagaccacccaggactctgctagaaatttttattaaaacatatagataatgtaacagtcttgtctcatttaaatgaatattttccttcatgctgatatatggatggtggctgaaaacagcaagatgagaaaattgctttcatttggaatactattgcacttgtgtttcctaagatatttcaggggtcagtctggtgttaggacattcatgtgcttctgatttgattgaagattgaattaacttaaattcttttttttgttgttttttactttttttatttttttaaagacagggtctcactctgtctcctgggaatggctgggactggagtgcagtgacaggaaccgtaactcacggcagcccggaactcatgggctaaagcaatcctcccacctcagcctcctggtagctggaactacaggcactagctaactgcctagctaactttttaaaaaaatagatggagtctcactatgttgcccaggctggtcaggaactcctggcctcaagcaatcctcccaccttggcctcccaaagcactaggattacaggtgtgagcccctgcacctggcctaattcaatttctcagaaggcgaaggggacagatccatccctgggaaagacatctgactgttctatgatggaaaagagaaaggactctgactccattagtaccccacgatgatctgaagctgcgaaagtgacccatcagaggagctgctgtctccaccatcacaggcaggtggggaatcaaaaagctgctgctgttgctgctaactggaattgtcggctccagacctctgcagggcttgctgaattcacacaggcaagagcctctcaaaacacactggtgatgatacagaagatagaaagaaattatttaggcagatagtaagagcaacagagtccttggtggaattcctctttaacaaaaagcagccccaaaatcatttcttttctaaacaaagagcagcctgaaaaattgagctgcagacatagataagcaagctggaagcttgcatgggtgaatgctggcagctgtgccaatagaaaagggctacctggaagccaggtatgttcaacctggaggctccatcttcccttttgtttgttaccacatgtgcggttaaaaaaaaaaaagcaggcaacatggcactggccaggtagacaacccatctgcataatgaagctgggtggggcagccagcttctttgcgcgctatgcaaacggcacacttagtcctaaccagttcatcatgtgctatgcaaatggcacacctggtccgaccaatctttcgtgtcctatgtaaatcagacacagcctcctcaatctcatctataaaaccttctgcatttcactgccaaagtggcaacctattttctccagaacccctctctgtgcagagagctcttctctttctttcacctattaaacttcccctcttaatcttactctggtggtccatgtcctagttttctgtggctgtgagacagcgaatctcgggtatttaccccaggcaatgacactgtttcagtggtatctcaaaaaaaatctaaacgggtgtggtggcttacgtttgtaatcccaacacttttggaggccaaggcaggcagatcacttgaggtcaggagttcgagaccagcctggccaaaatggcaaaaccccatctctactaaaaatataaaaaattagccagacattggtggcgggtgcctgtaatcccagctactcaagaggctgaggcaggagaattgcttgaacctgggaggcagaggttgcagt[135 bp omitted]tgattccaggtcttgagatgataacttaactctttcaaccaattgccaatcagaaaatctttgaatccatttatgacctgtaacccctctgccccacttcaagttgtcccacctttctgggctgaatcagcgtataccttacgtgtactgactgatgtctgcctgtaacttctgtccccctaaaatgtacaaaatcaagctgtaatccaaccatctggggcacacattctcaggatttcctgaagctgtgtcataggtcatggtcctcacatttggctaagaataaatattttcaaatattttagagtttagcttttttcatcaacaaatgacatccttagtcctggccagaagtcagaaccaactgagagagagagacagatcagcatgtcatcagtatttcctaagcaatacgcaatatcagggaatgtggccaagctgtgtagcccaatgggtttgtcatcacctcctttgcttcctgtcgcctccaatctaaatatcaacataggatgtaagtttggatgctggtgatagattaaaaatagcaatggcttaaattccatagaaatgaatttctctctcctgtaacagtcctagctggtatgcagttctgctttgtgagggtatcatgagtctgtgctcttccatcttgttctctgctatccctatgatgctgagcttgtaaaccaaaaatacaactcaaagccgccacctaccacacacctaaaccatctgaacggactccctccttggccaggccactccaaatttaacctgaaagactggttcagcccatgacgggtgggatgggggttggggttggatgtgctgaagcagggttgttcgtcttgggtaatacccgagattcgttgcctcaagccaatgaaatcaaggatgtggacccacaaggagtgaggttaggagcagaggtttaataggtgaaataaagagaaaattttgctgtcttctgcagagagaggggggtcccaagagggttttccggtccatggtgaagtgcaggaggttttatagatgagtttgaaaaggcagtgtctgatttacatagggcacaaaatattggtcgaaccaggtgtgccatttgtatagcatgcaaagagctggttagggttaggtgtgccttttgcatagctcctgaaaaagctggccaccccaccccaatcttttattatgcagatgggctgtctacctggcctgtgccatgttgcctgctttttttttactgtacatgtggtgacaaagaaaagggaggataaagcctccatgttgaacatacctggcctccaggtagccctattctattggcacagctgccggcattcacccaagcgagccactactttggttatctatgtttacagctcagtttttcaggatgctctttgtataaaagacgtgactttggggcggctttttgttaaaagggaaattccaccacagactctgttgcccttactatctgcctaaacaatttctttctagctcctgtatgagtgcttcattatggccgcatcccttttggagttcaggaaaaacagaccagcatttaacatcgacacagacctgaagtctgataagaaacatttacaatccattctctctgaaggctgctacctggaggcttcatttgcatcataaaactctggtctccacaacctcttatcataactcagacagtcctttctattgataataactctttcaaccaattgccaatagaaaaatttttcaatcgacctatatggaagcccctcccccaccactttcagttatcccacctttctggactgaaccgatgtatatcttaaatgttttgattgatgtctcgtgtctccctaaaatgtataaaacaaagctacaccccaaacatcttggccatatgttttcagggtcacctgagggctgtgtcatgggctatggtcactcatatttagctcagaataaatctcttaaaatattttacagggccaggcacagtggctcatgcctgtaatcccagcactttgggaggccaaggtgggcagatcacctgaggtcaggagttcgagaccagactggccaacatggtgaaaccctgtctctactaaaaatacaaaaaacttagctgggcgttgtggtacacccctgcaatcccagctactcgggaagctgaggcacgagaattgcttgaacctaggaggcggaggttgcagtgatccaagattgtgccactacagtccagcctgggtgacagagcaagactctgtctcaaaaaatgtatatattttagagggttttcatcgacacgcttgttcccagggcccctagcgtgtcgcacacttgttcccagatcccccagcatgtccccacttccacctgaaggtagggaaaacaagaaagggagaactttattgaagggcatgacccagaaatggcacacaactcttctgttcacataccattcaccagaacatgctcacgtgactacagctgctgcaaggaaggctgggaaatttagtctttattccaggcaaccattggccaaacttaaactcctctaactatgaaaggactcgtagattggggaggcaccactagcttctctgccatatatatttacaaccccaatagttgcttcctctgctaaggcaggtacattatcacatagtaggaggaagcagaccaaactgtagtcgttctggagacaggtaaatccaaaaatgggaggagaggatctgagccaagtaagctcattttcttctcccagactcatcaaactcatagcaggggacaaaagccaaaagttttattccaacttcagatttctaactggggcagtattaatattttagctgagacaagtttctgttgtatgggacagtcccacctattattgcaggaggttttgcccaataaatgtcactactgtttcatcctcaggcattgtgacaaccaaactgtaggaagatgggctgggcacagtggctcatgcctataatcccggtgctttgggaggctgaggtgggaggattacttgaggccctgagttcaaaaccagcctgagcaacaaaatgagatcccatctccacacacacacacaaaatcaaattgtaggaagagatttccaaaacctctaggaggggcaggggatgccttcgactgggaaatataggggcatttgtaaccacaccagaccaatctgattcaacttttatgtaacaaagctgtaagttgtttttcagttgccacggactcccaggttgaaggtccataacctaagcatgcccaggtgaaccaaacgtgcaaccttgactgaaacccaagtactcagactgggaagtgaggattgaattaagaagtggacactgcatggcgggatccaggatccaatcacattgagccctggcatcaccccagggcacggtccaatcaaatcatgcctccccacatcacctcattacaagatccaatcagatcatgcctccctgcaaataattacaaatgtagtacgagaaacactgaggtttgggaaatgttcacaataaggcaagatccaatcagatcatgcctcattacccttgggactataaaacctgtcccaacccctagctcagggagatatatttgagcctgactcctatctccttgcttga[139 bp omitted]cggtgaaacaccatctctactacaaatacaaaaaattacctgggcgtggtggcgggcacctgtagtcccagctacttgggaggctgaggcaggagaatggcgtgaacccgggaggcggagctttcagtgagccgagatcgcgccattgcactccagcctgggcgacagagtgagactccatcaaaaaaaaaaaaaaaaaaaaaaaaattcccaaggctttggtgtgtggctttccattgtgtgcaggcaaacagacccagttcaggtcggtgacatgtccttctcatagagatgtgagaaatgtaggattccctcacacagggcaggagaaatgatgactgatggtacagggactcaaggagccgggagaacaggtcttgaccttgaatgtcagtaaattcattgtctgagaatgggaggaaggaagtgagactggctcacaagtttatgggtgggggcaggaaataaaatgtgttcagacccagtgagtgaaatttaaccagaggaagctgagctggttcttgggtataattatgagtgatctaggctttgtatatggcagtgaaggctggaatggctgctgagaaaattggaaccaggaactgaccaacgagaaataaacagatttccagagattgctcaaggtctgtttgaagctgggcacatggatttgtggaatatgatgaggtttttttttttttaaataacccaatcaatcttttattttttaatttatagtaacccccttttattttttgcctttgttaaatgcccagacatgccacagtaccaagcattatcaataccaactcacattcctttccttatttaaaaaaaaaactaactttctaactcattacaaacaccccttcccctttcctctccactttcttttacgtgcccaccttatctaaaaaaaaaccaaacgtttagccaaccaaaattagtttaaattgtacgacccaaccccagccaatggggaaagggtaaaagagcaagacttgcatgaaaaatagactctcgtgcccctttgctcaggtatgctctcatggcaactggccaaagagacacccacccctctgcacaaaaataaaattgctttgctaaaaatcctttgttcaagtgttcaatttccttaaaattttaaacgttattcctaacagattcaaagtggttccaggatggaagggcaagttcaacctgtttgttccttcaacctggaatgcacttccccacagccccacactctcacccaacaccgacctctcttcacctatcacagagccaaactcaggatcccaggtccaaatccctaagtccaaatcctgattttgccacttacttgagcgtgaacttggacaatttatttaacctccatgaatctctgtttcctcatgtaaaaaaatggaagcaatttctaccagctagggatgttaggagacccaaatgactttaaaaggttgttgcacttaagaacacagcctccagagcctgatacctggttctgcccagttattcagcagcttcgtggcctggataagtcacttaacctctctgagcctcagtttccttttctgcaataggagaacggcagcacctgcctcacagcgttgttgaaaggataaaagagctaaacgatgtaaagtgtgaagttacataaacgaatatatgtaatgctaatctatgcaaagagtaggactgggctcagagccaagttctccataaatactagcaattgtcatgactatttcctccatatgggctcctgctctttcagtgacacacaaaaaaattccacatggtatgtggacagatatgttttattttcattttgttactgtcatctacatttaaatataattagcatattcatatataatttcgtgggtgttattgtttaaaaaaatgagtgaacttattttagatgagtcattttaaagaaaaatgttgagtaaagaaaagtgtagccggaggccaggcacagtggctcacgcctgtaatcccagcacttcgggaggccgaggcaggtggatcacttgagatcaggagttcaagaccggcctggccaacatgctgaaacactgtctctactaaaaatacaaaaattagctggacatggttgtgggcgactgtcatcccagctacttgggaggctgaggcaggagaatcgctggaacccaggaggcagaggttgcaatgagttgagatcacaccattgcactccagcctgggtgatagagcgagactctgtctcaaaagaaaaaaaaaagggtagccaagtgcagaggctcaggcctgtaatcccggcactttgggaagccaaagcaggaggatcacttgtgcccaggagtttgagaccagcctgggcaacataggaagatcccaactctacaaaaaaatttttttaattagtcggtcatggtggtgtgtgctgtagtcctagctactcggggggatgaggcaggaagatcacttgagccaagaggtcaaggctgcagtgagctgtggtcacaccaccgcactccagcctgggctacagaaggaaaccctgtctcaaaaaaaaagaaaaagaaaagtgtaggtgatgtgtgcatatggaaagaattacgaatgtggtatgagaaacactgaggtttgagaaatgttcacaataaacaaagcgggacatcagttaaagctgtgaaaaggatcttattcagtaaccactggcagtaggggaaagagctgagctccgttcagattcctgcagaggtggctgggtgtctagaaggcagaatgagggatggcgagagaagggcactgcaagtaaaaatcataaaaagttggctggctcatgcctgtaatcccagcactttcagaggccaaggcaggtgaatcacctgaggttagaagttcgagaccagcctggccaacatggcgaaatcccgtgtctactaaaaacacaaaaactagctgggcgtggtggtgtgcacctgtaatcccaactactcaggaggctgaggaaggagaatcgcttgaacccggaaggcagaggttgcaatgagccgagatcatgccactgcactccagcttgggcaacagagcaagacaccatctaaaaaaaaaaaattgtacagtgtcaatgggattcagccagctgtgtctgctagctggcaattgtcatagttagaattctatcctcccgcagagactgggagatggaggtcctctccttctgacaattctatttcaaaggaatggctttcagatcctctagaaacacccctgagttgtaggatatagatacatatacacccatgtctgaaaaaggaaggagtcataattgtaggcccttcttagtaaatgctctgaaaagggaaattaggggtatattgccagatattggctaggtcagacagtaaattctcctggcaaggtagagctttctcgggtggtattttaactgggggctggagtcatcctaagaacacgaccttatgctgc[134 bp omitted]gcagcctcgaactcctgagcgcaagcaattctcccacctcagcctcccaagtagctaagactacaggcacatgcatgccaccatgcccagctaatttttttatttttttgtagaaatgggggtctcattatgtttcccaggctggtctcaaacacctggcctcaagcaatcctcccacctcagcctccctaagtgctgggattacaggcatgagccaccacacctggccttggtcatctcttaatgcagaggtttacatggagttctgcagtcctcagaaacagtgacctgctaagttctcctcgtcctgcaggggtccgcttcaccgtctcttccccagagtcttcccttatccagcctgagtctcagctagattgagagtcagatcctttcaaagctctgtttttcatctttcctttccattaaagttctttcttttctttttttttttttgagaccgagtttcactcctgtttcccaggctggagtgcaatggcgtgatcttggctcagcacaacctctgcctcctgggttcaagaggttctcctgcctcagcctcccgagtagctggcatgcaccaccacgcccagctaattttctatttttagtagagacagggtttc[132 bp omitted]aactgaatcccaaaacaaactgacttcaggggaaacaatgagaatacacagaccagcatagcacacaagctgaaggatcagtatggacatcaggcacagctgaatctaggtgtttaaatgatgccattagaaatctctctttctgtgcattgactatgctttcacatgtgttggcctcgtttttaggcaatctctctactcatgatagaaagatggcccccagcagctgcacactgagatctcttcagctcagcaaacccggaagcaagaaaaaatgcttttaggctgggtgcggtgtctcacgcctataatcccaccactttgggaggccgaggcaggtgggtcactggaggccaggagttcaagaccagcctgggcaacatagtgaaagactgtctctactaaaaatatgaaaaaattagctgggcatggtggcacatgcctgtaatcccagctaatccggaggctgaggcatgagaatctcttaaaccccagaggtggaagttgcagcgagcagagatcacaccactgcactccagcttgagcaacacagcaagactctgtctttaaataaataaataaaaatttaaaaacagaaaaaagaaaaattgctttattccccagagttccaataaaatccgtaagagattgcttctccttggcctgttctgagtgccacgcccaggtctccaaaaatcactgttgtcaggggatgaagtgctctgattggccagtcctgggcccctcacctccctggagccatgaggaggctggtttccaaaagagaactccaggtgctgttacctggatacaagagagtactggctgggtagaaaccccagaaaccttacaacataatggttattaactgcatcgtaaatatttactttttcctacagtggtctcctgacctagctaatcactccagcagaggccttcagaccaactataaaaaaggcactttagcaaatgctaataaagaaataactgtgtcacctgataatgactattattagagacttatgggtgaaccttagcccctgggtggaacctgaacctctctgggagggaaaagcatgagcttctaagtcagaaagatctgagttcaagtctgaacactcccatttcactcacttgctcttcattcatttattcactaaaaagaaaacatgtaggctggctaggtggttcatgcctgtaatcccagcactctgggaggctgaggcaggaggatcacttgagcccagaagtttgagaccagcctgggtaatatagtgaaactctatttctacaaaaagaaaaaaaatttaattggctgggaatggtagtgtgagactgtagtcccagctactcaggagactgaggcaggattattgcttgaatccaaaaggttgaagctgcagtgagctatgaccgtgccactgcactccagcctggctgacagagtgagaccccgtctcaaaaacaaaaacatgtattgagcacctgttatatgcaaggcactgttctagtcactagggacatagccacaagccagacaacatccctgccctcctggatctgatattcaagtcggagaggtgggactaaggagggagagacagataatacaagtggacaaataaataaatcatctaaaatagcggtaaatgatgtaaagaaaacaaaacagtgtggcttgctagcaaagaggtggggaactgagttgcagcaggcattaagaaaggcctttttgatagagtgatgtgtgtgaattaagccaaaataataagatacagtcagctttgagattacatgagtaaggttctaaggagagggaacggctcatgcaaagcccctgagctggtgcctccaaaaactggcagaaagcccctgtgaacggttgtgtgatggtaggtgagttacttagcccctgtgcaccacgagaaaatggggatgctcatatctacccctcgaggttgctatgaggattcaaattaggcaaccctgttacaaggttaatgctgtgtccggcatatagtaggtgttcaataaacaccagctattagtttgagtaatataattattaatttgaggaggaaagaatggacctggggagtgagaagggtgaggaaaaagtagctagtgtagcttatccttctagaatctaaaattcaggatatagtctgagcaagctcctgataacgggattctaaacatgcctccaggacatcctagacaccaaattataattagcattgacttcatagtgactgccattcgttgagcgcctactacgtgaccaggcactactccaagcaccttgtgtccacggccctgtctgactctggggcaggcactattattaacgcctccattttacagaggagaaaagctgtggttcagagtccaaagccccgtcacctcctaccaggttgacctttggccattccttgcctttgatgtgagtgataggagcgggcgattctgcttctccctccatctcccggcggggattgtacggtgagagaatgagagcaaaacctcagagcccccttcccaggaaccctgtcccagcctggtccccacccaccaccaccactgacccgatgctagagaaggatgcggctggaggtgacttcccagccaacttggtgtaagtcatgtggggaagtggccagggtagggcatggtcatcgtgagcagggtcctgcagggtgaggccggggctgcagacgcgactgtacaggtctatgaagaccccatgtgtgatgaggagaccttctctgcacagtccctggacagaacacgagatgaggggtcctctggacgtcagctccagccacacccctacctggaggaagctgcttttaacaggtgcgttggagacagcggcttcaccacgggccagggacaaggaggagagtgtctccttacgagtccaagtcacccccactcagagctttgaccctgtcagtttgaggcccatgcagctcaggcacccaactcatgagaactcttgaaggccactccgccacaagagatgaccctattggcttcttttaggaagaagggaagtgaggcgcaaagaggagaacaggtcacctacccaagatcacagggctggcaaggggcaggatcagaatttgggaccccagcccagcccccttccaccagaatgccctgtctcacccctgcaatccgcaacttagtaataatacatataaataataacaatcataaaataataacagccgtaatagaaggtcactgtaactgaatagatctatataccagcctgtttggggtttttgtttttttgttttgttttgttttgagacaaggtcttgctctgttgtccaggctacagtgcagtggcccgataatgactcattgcagcttcaacctgctgggctgaagctgttctcctgcctcagcgtcctgcgtagctgggaccataggtatgcgccaccaaacccagctaattttttatttttagtagagatgaggtcttactatgttgcccaggctagtctcgaactcctgggctcaagcgatcctcctgcctcggcctccccaagtgccaggattacaggcgtgagccactgcgcccagcctgtcagcccgttctaagtgctttcctatagtaacatttacctcttatcacaactctttgagatcagagctgtacgatccctatttcacagaaggggaaactgaggttcagagaggtcatgtgccctctccaggtcacacacttggaagtggcagactgaagatttgaagccagatgggctggcttcccagaccacactttccagagaccacacacatctgcctctcagatagtgaatgaattgcttc[211 bp omitted]gaggcaggagaatggcgtgaacccgggaggcggagcttgcagtgagccaagatcgtgccactgcactccagcctgggcgacagagcacgactccgtctcaaaaataaataaataaagttcagttctgagccgggtgcagtggctcacgggtgcagtggctgggattacaaagtgctgtaatcccagcactttgggaggccaaggcgggcggatcatctgaggtcaggaattcaagaccagcctgaccaacatggagaaaccccgtctctactaaaaacagaaaattagctgggcgtggtggtgcatgcctgtaatcccagctacttgggaggctgaggcaggagaattgcttgaacccaggaggcggaggttgcggttagctgagatggtgccattgcactccagcctgagcaacaagagcgaaactccatctttaaaaaaaaaaaaaaaaagttcagttccatgtaattttaaaacctcaaagtccacctagttcaaagctttgctctgtccccagctcaggcaggtgtcacactggaaggaggaaagggacgtggtgggcctcttccctattttgtcagagctgttgtctgaggcctctctcagggcggagggcagaggggaggaaggaaagaaaaggagattggaaagtttctcctaggctgctgtagttttgtgatggaaacacggcatgctgtgtgttgctggatcttcctgggggcgggagggtggggtactttggaaattggctgtgccactggataaaacagcaaccagtttttagaaagtggtttacaacatgtttgcaaagtgagctgggggagcttacaaaacattgtccaaaggaaaacaaagccacagtgcaacgaacttcaactctgtaaatacaaaatgttctcttgataacagcaggtacctcgagagtgtgaccaggacaagcgtaggggtggaggtcaaagggatatttggctttatatgggtctacttttttttcctaaggagaagctcttgagtgattaaaaattaattttaaaaattatgaaaaaccttcaaagaaaatatactccccaaagtggttatctgagtattaggcttaaggatttgttttactgctttttactttactttccaaattattctataatgaggagcagacgttgttttttgtgatgccttgtaagaattgctgaacataattctactttttgtttaaaagaaatagaaacagccaggcgtggtggctcacacctgtaatcccagcactttgggaggcccaggcaggcggatcacaaggtcaggagattgagaccatcctggccgacatggtgaaaccctgtctctactaaaatacaaaaaaattagctgggcgtggtggcgcacgcctgtagtcccaactactcgggaggctgaggcaggggaatcacttgaacccgggaggtggagcttgcagtgagccgagattgcaccactgcactccagcctggcgacagagcgagactccatctcaaaaaaaaaaaaaaaagaagaaggaaatagaaacaataacaagcataaagcttgaaaaaaaaaaacagtaaaagtttccaaaacatagtgtttatttctaggagtctaagttttctgctataaaaatggaaataaataaatatatatatatgagtatatatgagtaataccatatatgtagagagagagagggagagagagaaaaagagagagagagagagggagaaaggtcttgctctgtcacccaggctgcagtgcagtggcaggatcatagctcactgaaacctcaaactcctggacttgaggaatcttcccacctcagcctcctgagtagctgggactacaggcgcgtgccaccatgcccagcgaattttttatttttgtagagacagggcctcactcagttgcccaggctagtcttgaacttctggctcaagtaatcttccagccttgccccacccctccccccgcccccgcaaagtgcaggattacaggtatgagccaacacaccggcctactcttatattaaaaaaaaaaaaaaaatgcctatcaggagtgaaaggattaggtgtggtgcccaagagacgcagggattctttttggggtgacgaaaatgtccttaaattgcttgaggtgatggttgcccaattctgtgagtatactaaaagctcttgaattgtacgctttaaatgagtaaattattggctaagaaagtagattttatgtgttctcaccacaaaaaaaataagtacatgaggtaatgcatatgttaattagctcaatttagccattccacaatgtatatgtattttaaaacatcacattgtacaccataaatatacacaatttgtatttgttaattttaaaaagaaaaaatagtggcaaggttataacttaatcagtgtccagaacaaacattatgtcaccctttaaaaatgtaccattcacattgatttataaccctttattatttctaaataaggtggtgagaaaatgttgggtgaggggttgggtaggagtaaatggagcaaagcagatcccagaaccagaagacattagtagtatatggagagagacactcaacaggagctgtgggctggaacagaaggacccagccaactgtaggactaatcccttcaagcttactcccccgctgccctctcctcttctgccaacgtgcccactgacagaaaccaaccagcagcaaaaggtaaggggaccccaacaacacagctcagagaagtcagcctttcaggcagcagagtggagcagagaagggtagaaaaccaatttttgcaacatccagtataatatacgtgcgtgcttcaaggggtcaaggagaggaatcaatgattcctcctccttccctgctcttccaaggcgccctgctcacatcctgcacctgctctgccttctcagagctgcccttctcggcacagctgaacaccttgaccgaaggagccagtgtccatcttcctgtccccggaaggcttgaaggcattctcaccacgtcttggttctgagggtatgacgcccagccagcagccatgatattctccccgaagggcctcccaggacctgctcacactggccgggagatgctgggaacccaaggcagcctggtcattagaaaatgacggctcaggactcgggcagctacaccgtcgtgctggaaaccagcaggggacacaggagtgtgacggagcagatccatgtcaagagtgagtggggccccgcagtgggaggggctgacttctcagaaagcagacccactggacctcagaagagcccaccaggacactttgcatgctggttatccattgctccccaataaaccaccccaaaacttaaaacatcaatcacttatctagctggacagttgttgtgttcagctgttggggtgtctgggtgttggctggtccagaatgacctccttcatgtgcctggccatggaccagctggtggctggagtgatggggatgagtgggccacatagcctcccaacctccagcaggctatcccaggcttgttcactcagcaatggaagaggaacaagaggtaaagctgcaaaactccttcaggcccaggctcaaaactgaccaccatcacttctgccaccttctattggtcaaagcaagtcacatggccagcccagcttcaacaggaaggaaaaaggccccacctcttaaggagaggagttgcaatgtgttgtggctattttttgtcgttgtgttagattgttcttccattgctataaagacatacctgagactgggttatttatttaaaaaaaaaaaaaaaagaagaagacgtttgattggctcatggttccacaggtggaagtgtaatgccagcatctgctcagcttctaaggagccctcagggagcttttaatcatagcgaaggcaaaggaggagcaggtgtctcccgtgagaacaggagcaagagaaagagagagtcagagaggaagtgccacattttacaacaatcagatctcatgagaactcactaccatgaggacagcgtcaagccataagggatccgcccctgtggcccaaacacctttactgaggccccaccaccaacactggggatcgcatttcaacatgagattttggcagggataaatatccacattataacagccaagacttgcaacagacattcatgagatacgcattcatcatcacttgggaaaggtagagaaggtctggtagcagccttcaacctcatctatatttttatcacctggactcaaactttcatatctgaattaggaaaacaaagccctgagagtaaccagacccatcctccttttagaagatagtccagagactgtcctagtcggctcgggcaaaatactctaggcttaatcaacagaaacttattccctcacagttctgaaggatggattgcaagatgaagctgctggcaggtttcatctcctctgaggcctctcttttttgacttgcggaagggtgccttctcattctgtccttgcatggtctttcttctgtgtgtgcacatccctggtgtctctctgtgtgtccaaacttcctcttcttataagggcaccagtcaggttggattaggacccaccctaacaacttcattctaacttaatcacctcgttaaagaccttatctccaaatacggtcacattctgaggtactgggggttagggtttcaacatatatgtttggtgggggactcaattcagttcataacagagatcaacttagttagggttcagattctgatgctctaacaaagactcaaaaagttccagtgtcggccaggcgcagtggctcacgcctgtaatcccagcattttgggaggccaaggcgggcagatcacgagttcaggagttcaagaccagcctgaccaacatggtgaaaccccgtatttattaaaaatacaaaaattagccgggcatagtggcaggcgcctgtaatcctagctattcaggagactgaggaagtagaatcgcttgaacctgggagtcggaggttgcaatgagccaagaccatgccactgcacacttagaaccccacttctgcacagaggggtttttactcccctcccagagaatttatggaccgctgaggttcatccatctgtatttctgtgatttgatgactaattttgtgtgtgtgtgtgtgtgtgtgtgtgtgtgtgtgtgtgtgtgtgagatggagcctcgctctgtcgcccaggctggagtgaagtggtgcgatctcggctcactacaacctccaccacccgggttcaagcgagtctcctgcctcagcctcctgagtagctgggatcacaggcgcccgccaccacgcccggctaatttttatatttttagtagagacagggtttcaccat[139 bp omitted]ctatgccattctcagtccgaagggccctttctaaagagagaggttgcaggaactcacgctcggtggtgcaggctgtgtggccagaactccctggatcaaatccctctggcatctgttatgcccctgagtccctgcaaaaaagtaactttctgttttgcacttcagtttccccatctgtgcaatgaggtcatagtggaacctacctcatagggtgactgtgaggagtaagtgagttaatcagtgctaaatgcctacaacaatgcctgacaaagagcaagtaaatgttagccctggccaggtgctatggctcacacctgtaatcccagcagtttgggaggccgaggtgagaggattgcttgagctcagaagttcgagaccagcctgggcaacatgatgagacgcccatctcaacaaagaatttaaaaattagccaagcctggtgatgtgcgcccatagtcccagctactcaggaggctgagatggaaggatcccttgagcccgggaggttgaggctgcagtgagctgtaaccttgccactgcactccagcctgggggacacagcaagaccctgtctcaaaaaaaaaaaaaaaaaaatagccctgtttgtttcaaaggacttgacttctttgagccttccttttctcatcaaaatgggaataaggccggcacggtggcttacacctttaaccccagcactttgggaggacaaggtgggtggatcacttgagcccgggagttcaagaccagcctgggcaacatggtgagaccccatctctacaaaaaatagctggatgtagtggcgcacgcctgtaatcccaactactctggaggagactttgagcccgggaggtggaggttgcagtaagctatgattgcaccactacactccagcctgagtgacagaacaagaccctgtctcaaaaaaaaaaaggaataataataattacttcataggattgttgtgaggattaaatgaataaatccagtggctttcatgagaaatgcttttcacatcatgtccagtatatcccacaactaaccaaaaggcaagtgtagtaacagttattactatgagtaatgctctctgatgttttctataatatttcttttcatgttttgaatgttgatcacagtctactaatgatttagacacctgggcatgggtctcgcatgcagtataacaagccatggattaacacgtgtgc[141 bp omitted]tccactaaaaatactaaaattagccggatgtggtggcgggtgcctataatccagctatagagaggcagaggcaggagaattgcttgaacccagggggcagaggttgcagtgagccaagctccagcctggatgaaaaagcaaaactccgtttcaagaaaaaaaaaaaaaaaagagcccaatccaggtggctgttatattgcctcttgtttgtacacctagtgggctctttctcctccttcaaggcttaactcagacacctcctccaggaagcctttcatgaggtctctggttgtgctaaagttcttttcacttataacattgcattgaaatcagaaatcagctctaagtggaagttcccagcacagtctgggagttcaaatcccagatgtgtccctactagaccacgaagcctggccctaatgagccccaaacctcagagcctttcacctgaaaaatgcagacaagaagtggggacctcttgggtcacctcctcgctgggctgtttccactcctccaaacttaaagtcaagttctcacatgatagccagagtgagcctgttcaaacctaagccagctcacgtccctcctctgggcagtcctcccatgggtcctactgcactcagagtcaaaatcagagtcctcaccctggcccaggaaaccccagcatgatctgctcccattatctctctgacttcttctcccagccctctctccctttccctcctctctatgcccaccttggctcacacccatctcagggccttttacttggtgttccctctgcctggaacatttttttcttaggaatccacatggcttattcctctgcttcttcaggactctgctcaaacataacctccccaaagaggtcctccttgacccaccttacctgaaacgggtttaccccacccccagtccaaccccacagccctgtgcagttttcctcacagcccttaccaccactatatatacttgtcagtttgttgaccctctcctcactcaatcgtaagtttcatgagggcagcaacagcgtctgtttaatcactgctgagcccccgagtcctagagccttagagtcctagatttggttcacccagatccagaggcgaggattcaaggacagatagtctgtttgggaggtgcaaggaactcgagagtggggaagttaggcagagaaggcaggaaataataaaagctgtgttcccaagctggttaccatgggcaactggagcacagtcccattggggaactcaggccctggtgtggaatgactctgcagagttatcccacatagcagagagggagctggggaatttatataccaacgtgtcctggcattgtggagggctgctccctgatgtgctcattccccagcacttccagcctgctgcctccatgggcagagtaggctttggccaccagtgaaagtcctcaggcaacgggatgcaggtgctggccgttggaagtgggaagggcaaggggttggactgggggcactgggcacagaccaggctcttcaaacacattcatgggtgaattaatgaatgaatgaacacatgaaagaatggatgtctctatggtgggcagaagaaatgcccagcttttctgagtggactccactcttgtggccttgttccctgtttgcacagacagcctccaactaatgccactgaagacattcccagctgctatccggggagtcatccagagtgagctcaactattctgtgatcctgcagtgggtggtgacaatggaccctgagcctgtgctgagctggaccttcagtggggtgccctgtgggatgggagagaagctgttcatccgacggttgtcctgtgagcagctgggcacctacatgtgcatagccacaaacagcaagaaacagctggtctctgagcctgtaaccatctcgctgccaagtgagtcccccattccaccccaccccaccccacccaagagccctgcaccctctccagcctgtggcagcctctatgattccattaagccacctactatgagcagtcccctgtgagaccctttataggcaaaatgtcattccaatgttccatccacctggcggactgtggattattaggccactttcttcttctttcttctttcctcttcttcttcttttctttcttcttctttttctttcttctccttcttttcctcctcctcctcctccttcttcttccttcttcttctccttctccttcttctacttcttcttcttcttttttttttttttgatagagtcttgctcggtcacccaggctggagtacagtgctgtgatctcaactcactgcaacctctgcctcccaggttcaagtgattctcatgcctcagcctcctgagtagctgggattacaggcatgcaccaccacatctggcctatttttgtatttttaggagagacggggtttcactgtgttgtccaggctggtctcgaactcctgggctcgagtgatccacccaccttggcctcccaaactactgggattacagacatgagccacctcgcccagccaattaggccattttcagatgacaggctgaggctcaaagaggttaactatgatgaaagcccagcttaggatctggaccaggctacctgggtccttggctccaaccatttgcttgttacatgaacatgggaagcctctttgcctctctgagtctcagcacatacctacaaaaaatgcagatcaaaatctaaggagtgggccaggtgcagtggctcacacctgtaaccccagcactttgggaggctgaggcaggaggatcacttgagcccaggagttagagaccaacctggacaacatagtgagaccctgtctctaccaaaaaaaaaaaaaaaaaaaaaaactaaaaatttaatcaggcatggtaatgccacctgtagtcccagctgcaatgggaggatcacttgagcccaggagtttaaggctacagtgagctgtaatcgcaccactgcacaccagcctgagtgacagaggatgactgtctcaaaaaaaaaatcaccattgtcatcatctaaggagtggttcaaagcaatggctttggaatttgaatccctggctgtgtgactctgagccagtgccttgacttctctgtgcctcagtttcctcatctataacactgggaagataatagtgcctaccccagtgtgtagttgtgagcattcaatgagataagccggtgaatagcttaaaacaataatgtctagcactatcgaacactaatgagtgctcaataaccgtgagccaataacactgttgcaattagcattgtcattattaattgtagctattaccatatacagtcggtatatggagccctaggtggcaatcaaaatgacagcaagttgttgagatcagagaagtggtttgggacctggtcaaaactcagttcagtccctgttcccgtgccttcctggctgggtaacttagcgcaagtgacttcccctctctgagccccagtttcctcatgtgtataatggaggtaatcctatatacctcttcagggttgttataaggaacgaaaacaaggggtgactgagtttggcagaacaactgtcaggcagcaggtgccttgaatagcagctgttatggtgaatattgtttttagtgtgttattcatggagggacacatggtgatatggtttggctgtgtccccacccaaatctcatcctgaattgtagctctcataatccccatgtgtcatgagagggacccggtaggaggtaactgaatcatggggtcaagtttttcccatgctgttctcgtgatagtcaataagtctcacgagttctgatggttttacaaaaggcagttcccctgcacacattctcttgcctgccgccatgtaagacatgccttgctcctccttcaccttctgccatgattgtgaggcctccccagccatgtggaactgggagtccattaaacctccttttttttaataaagtacccagtctcaggtatttcttcatagcagtatgaaaatggactaccatggcttggagtgaactagaggtatgcagaggaactggccaggagagaagagagggagggtatttggggtaggaaagaatgcatgagtcaaggttcagagctgggacatggaaatggaatgcgtgatgggaatctcagcttggctgggtcccagagaaccacctcacctccctggccagggtccagtgggagcttcagggctgatgcactgggggaaaaaatgtaaatcttatatcacctagtgaccctgatattcagtgagaaggacaatacttccaagacctcctttgctcattcatcaactgcccaggaaatgtttatgagcacttgctgtgtggccagcccacacagctgggaacactctggtgaccaagacagctgcagccctgccttcacaagacttacagtccagtgtccacagacagtgatcaccagagtgggcagggctgggatgggggagcccagagagctatgagactcagcctaggagttaaggagggcttcctggaagaagggacacctgagctgagaattatgcttagctggccaggtacagtggctcattcctgtaatctcagcactttgggaggttgaggcgggtgggtcacttgaggctaggagtttgagaccacgctggccaacatggtgaagtagatggtgaagaagatggtgaaaccccatctctactaaaaatacaaaatttagctgggaatggtggcatgtgcctgtaatcccagctaccagggaggctgagacacaagaattactggaacccaggaggtggaggttgtagtgagctaagattgtgccactgcactccagcctggtgacagagggagactctgtctcaaaaaaaaaaaaaaaaggaattatgcaagccaagagagagagatggcattccagagagacagtgcagcatggacaggcctggaggcaagagagaaagaaagggatgagcttggaaaattgagtggagtccagggttgcatggctataaaggcagggcaatgagagagatgaggctggccaggtggcagggcctcgaaggctaaggtgagaaactgacttctgccccagggtgctgggaagccacagcagggttctgagcaggggaggaacagggtcaggtgtgagctttagaaagatcctcctggcttccatgtggtaggaaggtggatgggtgctggactagggcaggagagcagggaggagagggggccagagacctggaggatggaagagaaggatggattgaagagacacttgggagggggaatggcaggagggaggggtgcacagggagggcgggcagatggctcctccaatctcacccctccttggtccccagaacccatcatgcagcccacagaagcagagcccatggagccagaccccactctgtccctgtcaggaggctctgccatcgggctccttgcggctgggatcctgggagccggggcactgattgcaggcatgtgtttcatcatcatccagagcctaaggtacctctatccctcacccccgtccactgggcaacatccactcagcccccatggggcacagagctggctcaacaaggaaacagagatgaaaccaacacccccatcagggagggtgatagcgactcctgaggagcccatctgactcactggtttccaaaatgggatcacagcaacaaagagatagaagaggacactagagctgggctgtctggcttcaagtcccagctctgtaacttactagcagtgaggctgtgggcaagccactccccttctctgtgcctcagtttgcccatctgcaaaatggggatgataataatagcatctgactctctgggttgttgggttgggttgttgtgagtgaatttttctttttctttttttttttttttgagatggagtcttgttctgttgcccaggccggagtgcagtggtgcgatctcggctcactgcaacctctgcttgccaggttcaagcagttctcctgcctcagcctcctgagtagctgggattacaggtgcataccaccacgcctggctaatttttgtatatttagcagagacagggtttcgccatgttggtcaggctgatctcaaactcctgacctcatgatctgcctacctcagcttcccaaagttttgggattacaggcatgagccactgcacccgtccagtgagtgaatatttctaagaaacttaaagcagtgcctggaatgtggtaagtactatgttcgtcctctctacacatatctgcagtgaccgctctgtgccaggcactgaggataccgagggaagaaacagcagaaagaccctgccctcatggaacttgcatcctggtcggggacaccatcaagaaacacaatgaa[131 bp omitted]caagacatcttgtcatctctctcaaaatataaaaattagccaggcatggtggcatgcacttatagtcccagctactcaggaggctgagatgggaggatcacctgagcccaaggaagtctagactgcagtgagctaggatcatgccactgcactccacactggacacagagtgagaccctgagtcaaaaaagtaataataataaatcttttaaaaaagatagtatgttggatgagcgctaaggagaggagtgaggctgggaagcaggacaaagattgtggagtggggtggcatttaacgagtcagggaaggcctccctgggacagtgacatttgaacaaagggagggagtggggagccacgtgagggtctgaaggaatggcatatccagcagagggaacagcaagtgcaaaggccctgaggcaggattgcctggcatgttcaggaaatagtgaggagcccagggtggccagagtggtgtgaagaatgggcagagaagtaacatgtgggtcagagagggagtagggaggcaggggaaggcagctagacccttgcataaggccttgtaggctctctgagcacttggcttttgctctgagtgagatggaagccatggagggtctagtgcaagggaaggatggcatctgacttatatttgatcctatatgttggctagtactacaacgctattaatatcttaccatcagcaaggcatggtggcccacatctgtaatcctagcactttggaaggccaaggcaggaggatcacttgagcctaggagtttgagaccggcctgggcaacatagtgagaccccgtctctaccaaaactaaagttttttttttttaattagctgagtatggtagcacgtacctatagtcccaccacttgggaagctgaggtgggaggattgcttgagcccaggaatttgaggctgcagcgagcgatgatcgtgccaccacactccagcctgcttgacagagcaagaccctatttctaaaaattaaaaaaataatgtttttaaaaaacttgatcttaccatgtattgagcacctattatatgctttcttttttttttttttttttttgagacggggtctcactccattgccaggctggagtgcagtggtgcaatctcggctcactgcaacctccaccttctgggttgaagtgattctcctgcctcagcctcccaagtagctgggactacaggcgggcaccaccatgcccagccaatttttgtatttttagtagagacggagtttcaccatgttggccaggatggtcttgatctcttgacctcatgatctgcctgccttgcaaagtgctgggattacaagcataagccaccaagcattactctatttaatctccataagagctggggaggtgagggggctgtggtaggggtgaagatctcatttcagtccagagagtagtgatctgcccagggcccacagctggagagaaaggattcaagcctagactcctgcctgccactttgttctagctcctgtctacactgccttttccaccatcagtaactgtacagacctctgtaatctatgttgtgaggaagagaaatctgtaggtggtagtggtttagggagacattgtggaccagctgggaggaactggggccaggtctccatccatgagtcctgcacacaaccatctaggggcaagggagggccagcctgcagcctcggccacccagattgccttcatcattgtggcagctccgatgtcctggcccctcagcacgtaccaggtgctgaaagccccaactctcagggctaggtgctattattgtcgtcatttcccaagtgagtagagctaacgctcagaaaagctcattaacttgcccaaggacacacagcgaatgaatggctggccctgaatcaaaccctgatctaagtctacagaggggaaaggtgaggagtcaggctggcatgaaaatcctcacccaggcacctcaagtccctgccctcatgagcaggcaagaagggtcactttctgtcttccccgcccttgtggccaagacctatttagttgtgagcaacagactcctgggacaaggccaatgggggcatcagctggaaggagctagcctcatccaatcagctgtgaccttgcagatgaggccacgtgtcatggacatggctgccttgaccctcccagtgaggaggaacatttctcagaaaagaagtgtatatgggctaggcaggaaccccatgcatgcctaccatgcccaccaagggccaggagagatccccattgtttgtagttgaggagagggacctgaagccaggctacttatattcacatctcagctctgctgtacatgaccttgtggaatttgggggagccctttaacccctcagtggctcatctgtaaaacaggaatatggcagtgtgtggtgctcacaattgtaatcccagcactttgggaggctgaggcaggaggattgcttgagtccaggagtttgagaccagcctgggcagcatagcgagactcatgtctctacaaaaaaaaaaaaaggaaaagaaaaattcactgggcatgataacacatgcttgtggttccagctactcgaaaggctaaggtgggaggatcgtttgagtctgggagttcgaggtggcagtgagccattattgctctactgcactccagcctgggtgacagagtgagactctgtctcaataaacat[133 bp omitted]aaaaccccatctctactaaaaacacaaaaattaacaaggcatggtggtgcatgcctgtaatcccagctatttgggaggctgaggcaggagaatcatgccaagaccagctcagtcagggaaactctaacccagcggtgctagaggaattaaagacacagaaatatagaagtgtgaagtgggaaatcaggggtctcacagccttcagagctgagagcctcaaacagagatttacccacgtatttattaacattagcattgtttctatagattttagattaactaaaagtatcccttatgggaagcaaagggatgggctgaaataaaggcatgggtatggctacttatctgcagcaggagcatgtccttaaggcacagatcactcatgcggttgtttgtggtttaaaaacgcctttaagtggttttccgccctgggtgggcaaggtgttccttgccctcattccagtaaacccacaaccttccagcgtgggcgtcatggccatcatgaacatgtcacagtgccacagagatattgttcatggtcagtttcggggccagtttatggccaggttttgcgggggggcctgttggtgcaatttaagctaaacatccctttaggggaccaattaataatgattccataggaatcgttgtgcagcacctctgcctgttctgcaatgcaatcttcctaaacaagtatgttcattttttctggccaggttcaattttgttacagataggtttttgagggcagtatgcctcaattataggaggagatttgttatggtaaatactgagatcagaaagcacatgtaactgtgtcatagagtgattacatccaggcattattgccagccaagattgatgaatatgcctaataagtataattgttctctgtgtcagcccttctttaaggaatactcacggcaatggtgattaccactatcatagctaccattactcattctgagtggttgtcccgctttcctcaggttttcttccatcatctgtgacagcttcttgatctgtctccagctgggtggctgtgttcgacgggtgtttctcgtgacagttggggtcctcctcagcatcagcctcgacatggctgcaaccggggggtcctcaggatcctcccggagtctcttccttggcatctggctcatgctaaaatttcaggtgtcttgatggtatccaaatcagctgttcatgttggcctggagaaacacaagcataaccaacaccccaagttattattttacctacttcccaactttttgttattggatctctccaccaaaccaattgttctgcttctgtctttgcagctggtttctgtagatgctgttcagctgctgataacatctggcctttgggcaggctcaaaaaatttaaagttaataatgctagactcaattgtgtatgggctgtcccataatccctgtttctccctcttttttgtttttgtcatcagttgttcatctgtatgaaatcataactgagcattttcaattaactgtgtggaatgaaccacgtatgaagaatcagaaatcatattaataggcatatcaaaagcagtcaatacctcaattacacctacaagctccgctttctgagctgaagtatagggcgtctggaaaactttacctttcaagccagaataagaagctgtactattactagacccatctgtaaaacaatgaaaatgcttagcaggctacagtatgtaaatgcaaaccgttcacagtcttgctcagctaaggggatagtaaagaaacagtcttttaaatctatgactattaaaggccagttttaagtcctctgaagcctccagtttctctttactcagcggccactgttctaaacattttaaaggtataggttctggaagcttaacaatggctgccatcaaaaatgatattctaatctttggcgggaactttgtctttccgcttgaagcggttctttcaaaccttgcaaatttttttctagtctcatgctagggacatgccccatttcatgcatcatatgttgattttgaaggatatataattgttctggagttagaacttgtgctccccattgttgtaataaatctttcccccacaaagttatagatacagaagttataattggttgaatagtcccaagttgtccatctggcccttcaaaatgcaaaatatagctactttgatatacttcaggggctttaccaactccaactatgttaaattgagtgggttgaattggccacgtggacgaccagtgctgtagagaaatgattgaaatgtccgctcctgtatctgccaagcctttaaatttctttccctgaatagttatttcacaggtggaatgtttatcagtaatttgatttacccaataagctgctttgccttgtttctttgtgcttccaaatcctcctgttcatttaatttcacttttccccattcccacatacggcacaatcaggagctgtgctgtgcgctctcctggctctgctttccagggaacagaagtagatgtaacaatttgaatttcctcattgtaatctgaatcaatgactcctgtatgtgtttgtaccccttttaaacttaaactagaccttcctaaaagtaatcctattgtccccgctaacaagggtccacagactcctgttgggaccttttacgggggttccccaggcagaaggctcacagcttttgtgcagcataaatctactgcggcactaccggctgtggcgggggacagacattgtacgggtgtgagggaatggcctgagctggaaatgccccagtttggaatggggcccaggacaggcccctcatggcatttcctgaaatcaggttcccttctttatcaaacttagagtgacactgattagcccagtgttttccttttttacatgttggacatatttcagactcagcagttttcttttttcccctatctggcagctgacttgctgattatttctacattcttttttagtatgaatagcttgtttaaattctttgagtaatttacaaggaaaaggctcaaatgtagctataatatttccctgttgatctggggggtgtattctaacagggaactgccaagcctctaaatcaccttctcttctagcttgctggattcctgcctgaatagaactgacagcagtcgctccaggcgctgctcgaacagtcactggggcaactacttttcgcccagcgtcctccagaaaagaaagaactggagggtcaggccactatttatggccagttttggggccagtttatggccagattttggggggcatgttcccaacagaatctcttgaacctgggaggcggaagttgcagtaagccaaaatagcgccactgtactccagcctgggcaacagaaccagactgtctccaaaaaaaagaaaaaagaaaaaaaaaaaaaaacccagggatgtgattatacttccctccaaagacaggagtgaggattaagtaaaatggtgggagtcatgagctgtgaacagtgcctggaatgtgatgagccttcaataaacctcagccatgtgatgatgatgattgtattagtttgctccagctgctgtaacaaaaatgctacagaccgggggggcttaaacaacaaaaatttattttctcacagtctggatgctggaagtccaagatcaaggtggcagccagtttgatgtcccatagtgcccctctccatggcttgcagaaggccaccttctcactgtgtcctcacgtgaccttttctctatgctcatccctggggtctcttcctcttcttgtaaggataccagtcttattggatcaggaccccactcttatgatctcatttaaccttactgtgtctgaagaatctatctccaaatatagtcacattggagggttaggactacatattaatttggggaacggataataattcagtcgatgattcttattctctctctctctctctctctctctctgtctctctctctctctccactgcaggactgacaggcagagaataggaatatgcagctgaaatgtgggcaactctcctgtcagctgaagaggtaataccaggaagggtgtgaaggaaatcctaggtttgggaacagaaagaagttcttgggcagagactccatatgtgatttcctccctcctggttccctggtcatttgtctgtgagatgttcccctcctgtggagagctccaggagctgcttttctcttcttttgccaactgccagcaccccatctgcccagctcatcaaattcctggaagctgcctaaacaagcagtctatatttcataaacctcttgggctccatgcaaaagaaactcactgacgtagctcaggaaaaaataaaatgaacagtttaatataaggacctatgaaatttttcagcaatccataggtgtgagtcagcatttgctttgtaacaaactgcctccccaaaattcactggcttgaaacaacagccatttatttagcttgcaatttcatgggtcatccatttgggctgggctcagctgggtagttctggtctctgccaggctcgctcctgcatctggggtcagttgacagattgcccaggggctgtctggactaggatagcctcatagctgggacaactggcctctccttcatgttgtctctcatcctccagcagggtgacccaagcttgttcacatggcagaggcaggattccaagagtaacagcagaaacttcaaggccccttaagtctcaagctcaaaatggacatgccatcacttctgccacagaaaggacttcattggccaaagttacatgactggccaaattcaagggatggggaagttgactccacctcttgctaagaagggaaaaatctgtggccatttttgcaatctacgaagaaatgtggaagtacacacagctctctctgccagcctcccccacacacacacttcacccccaccccaagcccttacaattcctttcctcctgcatgtggaatttacagttctctgtctctctctgcagatgggtgctttgtacctctctatccacgtggaaaaaaaaacccatcccatagcttccaagtctacaacatctctgttcaagggaacaacccaacgtaaccagactccctttgccctgtttctgaaacacctgaagaaaacatctgatgggttgactcggtgccatccttggtcccatcgccgtgacacgttgtgcaagcaaagcatcagaggctcatccctgtctgtgggagctcagtgctcagaaaacaggggggaggttttaccttggaaattggccagaccccaaaatatgtcttttacacatgctgctttttttttctctttttcaaaaagaaccaaaaaataaattaaaacaccaccacttctgaatggtttctcatgaagcctctcttcctgagagtgggagaggcatgtttgcaaataagatcaacctttgagctttgcactgttcaagtttaatacctctccataggaggatcctgacagatagcaggcacagggcacacaagtatggctgaaactcctctgggggatatatctcacatttgaggaaaattcggtgcttctgtgaccaacacagaaccacctaacatggcattctgcttagcaataatagtagcagaactgagtccaagtcttgtctgttgagggctctccatgtgccagccactgactatttaccttacatgattaatgtgtcatagcaggccaggcgcagtggctcacacctgtaatcccaccactttgggaggccaaggcaggtggctcacctgaggtcaggagttcaagaccagcctggccaacatagtgaaaccccatctctactaaaaatacaaaaattggccggatgtgggggcacatgcctataatcccagctaccggggaggctcaggcaggagaaccacttgaacccaggaggcagaggtttcagtgagccgagatcatggccactgtgctccagcctgggtgagggagtgacagtatctcaaaaataaaataaaataagtaagagatgttagccaggcacggtgactcacgcctgtaatcccagcattttgggaggccaaggcgggcagatcacctgaggtcaggaattcaagaccagcatggcaacatggtgaaaccctgtcccttgttatcacacgaatggggatgtggcttgtgtgctgcctaatcttgcctagaactaggtgtacctgcgttcttttgcttatggctttacccttggttaccctaattccctattctcctgcctcaagaggtgaccacagcagccctgggcctgccctcctagggcttatagtacagtgagggagacagacctgttcccagtgatgacccagagtcatcactctcctctgggaggccaggggggagtcttaatggagactggaggatccaggagggcttcctggtgagggaggggtcagctgtacta[137 bp omitted]cagtgaaaccctgtctctactaaaaatacaaaaaattagctggcgtggtggcaggagcctgtagtcccagctactcgggaggctgaggcagaagaatggcgtgaacccgggaggtggagcttgcagtgagccaagatcgttaccactgcactgcagcctgggcaacagagcgagactccgtctcaaaaaaaaaaataaataaataaaagagcagccaggtcttctggttggagttggtgtttaagaaaaataaaatttaaaaattaaaatttttttggccgggcacagtggctcacagctgtaatcctagcactttgggaggccgaggcagatggattgactgagctgagctcaggagttcaagaccagcctggccaacatggcgaaaccttgtctgctaaaaatgcaaaaaaaattagccaggcgtggtggtgcgggcctgtaatcccagctacttgggaggctgaagcatgagaatcgcttgaacccgggaggcagaggttgcagtgaaccaagattgtgccactgtacttcagcctgggcagcagagcaagactctgccaaaaataaaaaaattttaaaaattgtttaaagagcagccacgtctccatagtggtaattgtcaggcatcgcaccaaagagctttaatgcgttcttctcaaacagtcctcccacttcagcctgccaaagtgctgagatttcaggtttgagccactgtgccatgctatgcccatttttcagataaagaatcataagccccaggagacatcaataataattg[135 bp omitted]cctccacctcaagtgattcagcctcccaagtagctgggattacaggtgtgcacgactaccacccagctaatttttgtgtttttagtacagatggggtttcaccatgttggccaggctggtcttgaactcctgacctcaaaagtgtgggggaaagaaagagagatcagactgttactgtgtctatgtagaaaaaggaagacataagaaactccattttgatctgtactaagaaaaattcttctgccttgagatgctgttaatctgtaaccctagccccaaccctgtgctcgcagaaacgtgtgctgtattgactcaaggtttaatggatttagggctgtgcaggatgtgctttggtaaaaatgtgtttgcaggcagtatgcttggtaaaagtcattgccattctccagtctcaagtaaccagggacaccatacactgcggaaggcagcagggacctctgcccaagaaaacctgggtattgtccaagatttcccccactgagacagcctgagagatggcctcgtgggaagggaaagacctgaccgtcccccagcccgacacccataaaaggtctgtgctgaggaggattagtgaaagaggaaggcctctctgcagttgagataagaggagggcatctgtctgctgctcgtccctgggaatggaatatctcggtgtaaaacccgatcgtacattctatttactgagataggagaaaactgccttatggctggaggtgagacacactggcagcaatactgctctttactgcactgagatatttgtgtaaagtcaaacataaatctggcctacgtgcacatccaggcacagctcctttccttaaatttatctatgacaccgagtcctttgctcacgttttcctgctgaccctctccccaccattaccctatagtcctgccacatccccctcaccgagatagtagggatagtgatcaataaatactgagggaactcagagaccagtgccggtgcaggtcctcacttgctgagcaccggtcccctgggcccacttttcttcctctatactttgtctctgtgtcttatttcttttctcagtctctcgtctccaccttgtgagaaatactcagaggtgtggaggggcaggcccccttcaaaatgatccacccacctcagcctcccaaagtgctgggattacaggcatgagccaccatgcccagccacatataacttatttctaaataacttatttaactaacaccacatgattttatgaccccctattttatggatgagaaaaaagaggcaagagaagcgataccagttgcttaggattcccagctaccaattagtggaagcagaatttgaaccaagggagtctctggagccctcgttcccaatctccttttcttcctctccatgtctttctttctccccctgctcccaggcctcctacatcacacccttctggacaaagcttcacatctgacattttcttttttggggtggacagagtcttactctgtcaccgaggctggagggccgtggcgcaatcatggctcatggcagcctcaaactcctgggcttgagggatcctccagcctcagcctcccaagtagctgggactatgggcatgtgccaccacacctggctaattttttaattttttgtagaaatacagggggtgggggcatatctgaaaattttaaaccttccctgactgccgtgagcatttctgggtagaagccactccacgaccttactttgctggcatgagtgctggacagcaatttggcaacatcctctagaccacaaatgtgcatggcctttggcccagcaaatcagcttctgggaataaatatgacagatactgttacatacatgggaaatgccatggacatgatgacccagggaagcacagtttgcaagtacaaaagggctggaaacacccaaaaagcccatcccctgaagacagtttcaaaaatgacggtgcattcatgtaatggaatagtacacatttgtgaatgaatgaatgaggtagctcaatatatctgcctatgggaaaatcaccaagatatgttgctaagtgaaaaacagaaagatacagaataatgctaccattttattttttaatgggagagggaagaataaggaaatggattcatatttgcttaattacacaagcttcctgatgatcctttt[137 bp omitted]catggtgaaaccccatctctactaaaaacacaaaaaaattagctgggtatggtggtgcaggcctgtaattccagctacttgggaggctgaggcgcaagaatcacttaagcctgggaggcggaggctgccgtgagccgagatcacgccattgcactccagcttgggagacagagcaagactgtctcaaaacaaacaaacacacacaaaaaataagatgcccattggagatctccattcactattttatcagatgatatttcagcacttgagtgaagaaaatgtctacaactggtccaaacactcaaggaatttagactcttgacagagaaacacacagaagcaagcagatatgccccgaaccaaacttgctttttcttctaagcctgcttcttcggagcagcctctgaccctccagggccctgagaggagtccctggagccacaggagcttgggagcccagagaagtgggggaatcccagatggtgacagcatcatccagaggaggaacataacgatggccacagattcccaatttggaaataactcagcaaaacaacactgacagaaaattcagagatttccaagagactagcctccctgtttccatttagaaattcacctacatacatccagggtgagagaccccaagcatcagatgtgtcatacacaagcatcagatccaagttagagagggcacccggggacagaaacctccaagccagccaaaagccaaaggaaggattttacagaaagatacaggaatgtggggccaggcacagtggctcatgcctgcaatcctagcactttgggaggccgaggtgggaggatcgcttgcggccaggaattcaaggccagcctgagcaacatagcgagatcctatctctacaacaaatttaaaaactagctgggtgtgatcacatatgcctgtggtcccaactacccaggaggctgaggcaggagttgagcccaggaggtggaggctgcaatgagcaatgatggcgccacttcactccagcctcagtgaaatagtgagaccctgtctaaaaataataataaaaataaaaaacatataaagatgtcagagcacagggaccagagctgttagtcggcctcatggagaccctggccaggacagccacctctggggaccaggaagtctctcagtttctgtctctgagggtttggctctctgagtctctctgtcacctctcatttctctctcatctccctctgtctatgctgtgtctctatctctttcaatctctctgtctctgtctcccagcccttatctctgagtgtgtctgtttctctctcatttctctctctctctctctctctttctctctctctctttctctctctctctttctctctcccccctccctcctcccctctccctactgcaggctggtccataacccttatcttccccagacctgatggagttctggtattaatctgtttatggtctgtttccctccactagaacacggtcttcattaaaggcagagatttttgtctgtcttattttctgctgtatacccagtgcctgggatactggctggatcaataaatatatgctgaatgaagaatgaatgaatgaccattctcatgaacattattatttgatgccaactgtaaagcaacaataataataattgtcactgccactgctgctattgttggtatatcagctttttatttagtacaaactatatccccgaaattgagctaggcagtttcttgtttaagttttacagaccacgctgtgaggtaagtactgttagtatgcccttttttctttctttttgagacagagtctcactctgtcgcccaggctggagtgcagaggcccgatcttggctcactgcaacctctgcctcccgggtacaagtgattttcctgtcttagcctccccagtagctgggattacaggcatgtgccaccatgccggctaatttttgtatttttagtaaagatgggtttttg[135 bp omitted]agacaggtctggctctgccacccaagctgtagtgtagtggcgcaatggtagctcactgaagcctctaactcctgggttcacacagtcctcctgcctcagcctcccaaaatgctggaattcaggcctgagccaccgcgccctactatgcccatttttcagataaagaatctgagggccctcgaggagaaaccacttgcccaacatgagccctggtcttgtctgaccccaaagcccatgggaagtttaggctgcgtggaaggacagcctggtgggctcaggatctgtcccatcacgagttggaacctcagctctgccactcggcaaccgcgagccgttagtaagttgctgaatctctccgtgtgcctccgtttcctcacctggaatgtgggcgacctcacacaggaagccgcctcttctagtgggcaccgacggagcgagcgcgcgtctgcagcgggactgagcgccgggagagacctgcgcaggcgcaggcgcgcggggagggccagcctgggtggcccaccccgcgcctggcgggactggccgccaactcccctccgctccagtcacttgtctggagcttgaagaagtgggtattccccttcccaccccaggcactggaggagcggccccccggggattccaggacctgagctccgggagctggactcgcagcgaccgcggcagagcgagcgggcgccgggaagcgaggagacgcccgcgggaggcccagctgctcggagcaactggcatggcccgagccatggccgccgcgtggccgctgctgctggtggcgctactggtgctgtcctggccacccccaggaaccggtgagtgacccccgcgcagtccggtggcccctgtctggctcccagctccgcatccaggccgggtactcgcccccttgggttcccgaagatgacggccccgcccggcgccacccaccccccatctctgccccggggttggaaggaacacggtgcgagggtgcgagggcaggaccctcctcttggccacccggagagcggtcggagttgggtacagaaattcctcgaaattggcagcaacacgggtcgggcacaagaccctcctctgggcccctcggaaaggggatggagttgggtgaggaaatttcccaaaaaggcaagtgaatcccggaaaatcagcagatggtgacgcatgccggattaccttacccaggttcctgctcagcatacccaggccataacccagcagcgtgctggcaggctgggtctggacggaggggatggttgatgttggggaggaggacagtgggtgacacttgacaccattacccctctgacccccaatgtctgactccaggggcctggccattcattcattctttcattcttttttttttttttttgagacagtctcactccatcacccaggctggagtgcagtgtcctgctctcggctcactgcagcctcctcctcccgagttcaagcgattctcctgcttcagcctcccgagtagctcggattacagacatgtgccactatgcctggctaatatttttgtatttttagtagatacaggatttcaccatgttggccaggctggtctcaaactcctgataaatatatatattatatattattattatatattacatattatagtaatatataataaaaatatataatatatattatagtaatatataatatataataaaatatataatatatattatagtaatatataatatataataaaatatataatatatattatagtaatatataatatattataatatattatatatattattataatatataatatgtatattatatattatatatattattataatatataatatgtatattatatattatatatattattataatatataatatgtattatgtattatataattgataatatataataatatatttcttaataaatatatattaaatatattatatatttataacatatattatttatataataaataatatatattttattatacatttaaagagtaaatagataacatattttattatttatttatatgttttgtgtatatatatatatatatatatatatatatagtgcgtgtgtgcgtgtatgtgtgtgtgtgtatgagagagacaaggtcttgctttgttgcccaggctggagtgcagtggtacaatcccggctcattgcaaactcgacttcccaggctcaagcgatcctctcactgtggcttctggagtagctgggattataggtgctcacctggctaattttttttgtatttttggtagagacagggtttcgctatgctgcccaggctggttgcagccaagcacagtggctcatgcctgtaatcccaacactttgggaggctgtggtgggaggatcacttgagcttaggaattcaaaaccagcctgggcaatatggcaagaccccatctctacaaaaataattaactaaataaaaatttaaaaataaaaaagaatgcataggaccatgtttattagtgtcaataagcgctgtcacattttgaggacctactatgtgctagggcccttagcagaaagatttttatataggacctgggggattagaggtcagtctctgaccgcccaagttcaaatcccacctctgccactaaacctctgtatgacttggaggacactatactctgtgtcagtttccctgtctgtaaaatgatgttaacagtagtgcttgcctcaggggggctatttgaggattaaatgccaagatatatgtgaagcacccagaatagcccctgatctgtgtcagcaccctgtgagtgtccactgttctaagtctcattttacaaactaggaaaaagaatcagagaggttaagtaaccggcctgaagctccacagcagaaaactgaagggacccaaaactcctgggctataattgccttcctctcgtgcctcaatcccccacattcttccaaccaggacccacccagagtaataatgcagtgtttcatggatttgaagacccaagatttctccccgttttctacattggggttattctaacccctaatggcaagttgtgctataaatgacaacagtcatggtatgtgaaacctacgacactggtgcgatgaaaaagttctgggccaggtgcggtggctcatacctgtaatcccagcactttgggaggccgtagtgggaggatcacttgaggtcaggagttcaagaccagcctggccaacatggtgaaaccccatctctgctaaaaacaaaaatacaaaaaattagccaggtgtggtggtgggagcctgtcatcccagctacgcggaaagctgaggcaggagaaccgcttgaaccccagaggcagagcttgcagtgagcagagatcgcgccactgcactccccctgggcgacagagagagactccgtctcaaaaaaaaaagagaagaaaagaaaaagttctggcgctatatagtagtaacggttgcacaatatcgtgaaatgtacatagtgccactgaactgtatgctttaaatgacttaaatggtaaatttagttttttaaccacaatatttaccacaattttttaaatcagtgatgttgagattcagggaaatacggtaataatagaagaaatacggtaataaatagccaaagtgaaggagcacggccaagttgcagaccatcccagacgcccttaccctcctcgcctgccatggccccaactagtgccccagttccccctccccccacaccccacggtccaccggggatccagggccccagcgtgcaagtgcacgcccaggtgcccgggctcctggagcccctccctatctagtccaagaacgccccgggtctgacaccttctcttcggttctccgcaggggacgtcgtcgtgcaggcgcccacccaggtgcccggcttcttgggcgactccgtgacgctgccctgctacctacaggtgcccaacatggaggtgacgcatgtgtcacagctgacttgggcgcggcatggtgaatctggcagcatggccgtcttccaccaaacgcagggccccagctattcggagtccaaacggctggaattcgtggcagccagactgggcgcggagctgcggaatgcctcgctgaggatgttcgggttgcgcgtagaggatgaaggcaactacacctgcctgttcgtcacgttcccgcagggcagcaggagcgtggatatctggctccgagtgcttggtgagcagggggttttggggaggctgaatgaaaggcagagacttggtgggaggatcagggaagttggcaaagagcggggaggcctgggagggagggagattccctccacagcagatcccctggggacaaaaggagggggcagcgcaatgatgtggggtggggtggggggaggtgagtggggggaggggctgcagggcaggaagaaagcagagatctcagggagtaaggacccccaagcctgggatcagaaagccctgagggaggaggaggggtatattggaaagggagctgggaggggactgggaaggaagggaggaggcctgggtggcctcttctgggtccctcctttcctcatctgtaaaagggttggtgacaacagcatcacccttggaaagctgtcctgagtgtcatcactgcctaggaaagagtctgtctgcccccttggactgtgtacccatgagggcagaaccggggctattttgatcactgctgggccccagcactttccaccaaacaatatttattgagcacttattatgtgccattctaagagctttacctgcatattctaattgcctgtgattccatcattatcacctgttgacagacaaggaaactgaggcacagacttgcccaagaccaaagctgcagccttagggcagcggcgcttcaccgctggcccatgtgagccccttagagctgtcggttactgttactttatctggtgaagaaggagaaagttgaaacagacagacaggaaagcaaggatcctgatacccaaaagaggaggggatcatgctttcattttcatgagctccatgaagccttcctcttggaacttgagcaagaagtctctgtgcctcagtttcctcatctgtgggatagggatcaccatgaggattcaaaaaaactgaccctttttttttttttgagatagtttagttctgtcgcccaggctggagtgcagtggtgtgatcatagtaggtcctcactgcagcctggaactcctgggctcaagggatgttcctaccctccctgtagctggaattacaggaatgtgccaccatgcccaacttgttttctgttttgttttgttttgttttgttttcttttctttttaagcttatgtgccaagaactattccaagcctgtgcatgagaaactcatgaaatgtcaagggcttggaactgtgcctagcacacaacacccaaccaaaggcagctgttgtcactccagcaagcctgggattctgggtatcatggtttaggatgagggtaaaacagaaacagtgagtcaagttaaggagaaatcttcggtaaataatataggtaatgatggggaaggaagttccaggtttgggaatcaccaggatgatgattaagagatggtcaaggtggttttggagtcagacagactttatgtgaaagcccagctctgctgcttacagctgtgtgaccatgggcaagtcacttcccttctcaacttcagggctcaggcttcctctcctccactgagccccagaccaggataaccccctttgggtttcccctttccagccctgccctctccgagtcatcactgcctaggaaagagtccgtctgcccccttggactgtgtacccatgagggcagaaccagggctattttggtcactgctgggctccagcactttccaccaaacaatatttattgagcgcttattatataccattctaagagctttacctgcatattctcattgcctgtgatcccatcactatcccctgtcaacagacaaggaaactgaggcacagacttgcccaagaccacacagctgctcagggacacagctgggatttaaaccatgccattctgtatcttttttttttttttttttttgagacagaatctcactctgtcgcccaggctggagagcagtgacacaatctcagctcactgcaacctccgcctcccgagttcaagcaattctctggtctcagcctcccaagtaactgggattactggcgtgtgccaccataccctggctaatttttaatagagacagtttctccatgttggccaggctggtctcgaactcctgaccccaagtgatccacccacctcagccccccaaagttctgggattataggcgtgagccaccccgcccagcaaccatgccatcctgtacccttaatgaatgcccccttctgccacggaggggttcattgaatgacttgttgcttttgttcctcttcccagccaagccccagaacacagctgaggttcagaaggtccagctcactggagagccagtgcccatggcccgctgcgtctccacagggggtcgcccgccagcccaaatcacctggcactcagacctgggcgggatgcccaatacgagccaggtgccagggttcctgtctggcacagtcactgtcaccagcctctggatattggtgccctcaagccaggtggacggcaagaatgtgacctgcaaggtggagcacgagagctttgagaagcctcagctgctgactgtgaacctcaccgtgtactgtgagtgtgcccaagtcagcgatggcaagaacccctgccgggctgcccccaccactgtctacactgactccccaaggcactgtaggcattgcttccatcatctgcaccggctcccctgactcctgtctacacgacccacccccattgtctgcaccagctcccctgggccgtaaacaacactgtccctattgtctacaccagtttacttgggccatagtcaatgctggtacccagactgtctgccctggctcctctagcggctgtctgcacggatacctgacactctgttgactcccttgagcacagtctacactgcccctaaactgcctacacccatttccccaggcaagtatccacaatgaccctccccacattgctacactggttcttctggccacgatcaacactgcctcccttattgtctacacccactcccttgtccttttctttctttcctttttttttttttttttttgaaatagagtctcactctgttacccaggctgcagtacagtggcatgttctcggctcactgtaacctctgcctcccaaattcaggtggttctcctacctcagcctcccaaatagctgggattaaaggtgcacaccaccacacctggctaatttttgtatttttagtagagacagggtttcatcatgttggccaggctggtttcgaactcctgacctcaggtgatcggcctgcctcagcctcccaaagtatgctggaattataggcatgagccactgtgcccggctttttgttttgttttgtttttcctttggacagggtctcgctctgtcacccaggctggagtgtaggggcatgatcatggttcctacagcctcacccttccaggctcaagcaatccttctccctcagcctcccaagtaactgggactacaggtgcagccaccatgcccggctaattttacagtttttttctagagagagttttgctgtgttgcccaggctggtctcaaactcctaggcttaagtgatcctcccgcctcagtctcccgaagtgctgagattacaggcgtgagccactgcacctggccccttgtccattttctacactgccttaccattgtctacactggctctcctgggccacagacagcactaaccccattgtctacaccacctattttggccaccagctgtggggtgttttcactgtctcccatagtgtctacactggctcctatgaccactgtctatgtaaacaccccactttttctacactggttctcctaggcactctctaaagtgccccctgacactgtctacactgactccctggagaactgtctgcattcacctcccacattgtatcgaccagttcccctgagccacgatcaactgtctccgccgggtgctagttgcattgatcttctcacattgtttgtgctggctcccctaagcagtgtctgcagagtcccccagtgtagtctccatgttcctctgcccaatattgtctacactggctcatctacaggctatccagtctcaccccacatcaccacactggcctccttgtgttctgtctgcacagccccctgacagcatctgtcctgattctcctgcacagcgttacctccaccagctccctcatggcatcatcgacattgacacccacacatttatctccactgacagccccaggactctctaaccagtgctgtctaacagaaatagcatgcaagctgcatataggatttta[144 bp omitted]gaaactctgtcttcactaaaaaatacaaaaattagccaggcacggtggcgggtgcctgtaatcccagctactcgggagactgaggcaggagaatcacttgaacctgggaggcggagattgcaatgagcgagattacgccattgcactccagcctgggcagcagagcaaaactccatctcaaaaacaagaaaagaaagagatgaaatttatttgtttatttatttatctatttatttatttgagacggggtcttactctgtcacccagactggagtgcagtggcacagctccctgcagcctcaacctcctgggcttaagtgatcctcccacctcagcctcagtctcctgagtagctgggactacaggcgtgtgacaccatgcctagctaatttttgtttttgtttttgtttttgtttttttgttttgtgatgaagtcttgctctgtcacccaggctagagtgcagtggcacgatctcaactcactgcagcctccgcctctcgggttcaagtgattctcctgcctcagcctcccgagtagctgggattacaagccctggccacagtgcccagctaatttttgtatttgtggtagagacgggatttcaccatgttggccaggctggtctcaaactcctgacctcgtgatccacccaccttggcctcccaaattgctgggattacagacgtgagccaccgcacccggcctatttttattttttctggagacaggatctccctatgttgcccaggctggtctcaaactcctgggctcaagtgatcctcctgcctcaacctcccaaggtactgggattacaggcatgagccactgtgcctggccaaaattaatttttaataattgcctttacttaacccaatatacctaaaatattatttcaacttgtaattgtttttttaaaattattcttgagatctttcccatttattttgtcctagtaaagcctttgaaatctggtgtgtatttcggcctggctatatttcgagtgctcagtagtcacatgtggccagtaggtgccatattggacagcacagatctagactaagctcccacatcatctacactggctcatccaaatactgtctacacacatacacagagcctgtcttaatttcgtcagctcccggggacacactgtatatgtgggggtgatctcacccccaccaccacattttcaacactggcccgacaatatagcatctgctgtaatattccaacaccctgtctacactgaacccatcagtaatatccacacaagctcttctagacatcattcatactgttcctcccaccattgtctatactgcttactccccgccaggcaattggtacacagattccctcaggtactgtctatactggagtccctcaacactgtcactgggtctgagcgaggaggagatctacactgactcctacccctcgcccccgaataaaaccctgtcccattggcctgcccccaaggacattgaaaggtcttcgctgtcaatcacgtatgggatggctgagcagcagcctagagcagggttatctgggactctttcctgcaggacttgtcagaaccttgaatacactgctgtgtgttgtgagtggtcattgcctatgagtgagaaaaggaggaggcattttcctgcaggacacccaagacatgcctggtccaggctacccaggaaagctagtggagaaaagcagctcctcagaagccttctccatgtccccactgaccaaggactcctaggcttctgctctctgtggcaccccatctacctagactcctcctaggcctctccagctcccgctgttttccaaatatccccgggccttttcctgcagtgtcgtgaatcccgcgtagccccaggccccccaaagcctcccagtctctgaacctctgtatccatttcctgcagaccccccagaggtatccatctctggctatgataacaactggtaccttggccagaatgaggccaccctgacctgcgatgctcgcagcaacccagagcccacaggctataattggagcacgtgagtcctgggtctcagggaggaggggctgggggtctggatttctagcactgagggaggaggggctgggggcctggactcctgggactgagggagaaggggctgggggcccggacccctgggtctgagggacgagaggctgggagcccggactcctgggtctgagggaagaggggctgggggtctggacccctgggactgagagaggaggggctgggcctggacccctgggtctgagggaggaggggctggggggtctggacccctgggtctgagggaggagaagctgggagcctggacccctgggtctgaggcaggacagactggggcctggactcctggtctaagagaggagggagattcagaaaagagaaaaagaggaggttgacttcgggcccccagtggggggcatctctgttttgacatctctgttttgcggttgaggcgtttagcaggtggttgaatcctggctggtggatgcacctgctttttggggtgtgcctgctctgtgcccggtacttcccccgaatcccatgtgaccccatgctgtgcacagtcagcagctgttgccctgcccaggttaaagaccagccacgagagggcagaagcggcccttgaatcagcgctcggctccaaagctggtcctccgcctcttggccaagcttgtctaacctgcaggccacatcatttgtaaactttcttaaaacattatgagactttttttttgcgaatttttttagctcattagctattgttagtgttagtgtattttatgtatggcccaggacagttcttcttcttccaatgtggcccggggaagccaaaagattggacacccccactctagactgtaaccacctcaccgtcaccttgtgtaacctacttggttatctctggatggagcaagtactatatatccccattgtctagatgagaaagttgaggctcacagcaataagatttccccagattcacactgaggctgagatcaagagcaaggtaagaaaaaggcaaagagataatacataattttataatacataattttacataaattacataattttactgaaccgccctttttttttaaagaaggggctctgttgccgaggctggagtgcagtggcgtgatcatagctcactgcagcctggacctccctgggctcaggtgatcctcccacctcagcctcctgagtagctgggactacaggcacacgccaccacactcagctaattttgttgtattttttttgcagagacagggttttgccacattgcccaggctggtctgcaactcctgggctcaagcaatcaacccacctcagcctcctaaagtgctgggattacaggcgtgagccacctcgcccagccttaggtctttttccttattacaaaaataacttgtgtccactgtagaaatatcaaacaatttagttatgagcaaaaagaagaaagtagtgcctatagttcaagtgtacccagccacctccagaaatacccagtgaccccttattatacatcctgtcttttttctctctgtttctaaacaaagactggaattatgctgtacatataattttgaaccttttcgtctgtcttgtgaatacctttccatgtcaaagcacatagatccacaactccattttcccccacgttgtattaggaagactgtcaaacatacagaaaaatcataggaattttccagtgaacacttaagattccaccacgtggattcccctgctaacattttactgtgcttgctttatcacgtttctgtgattccttcagtccctctattcatccatcaatcatattatgcatttcagagcacccccagctctcctgcttttttttttttttttttttttttgaggcagggcctcactctgttgctcaggctgtagtgccgtggcacaatcacagctcactgcagccttgaattcctgggctcaagcgatcctccagcttcagcctcccagatagctgggactacaggcacacaccaccacgcctggctaacctggccccttttttagtgttgctgggattccaccactttaaaaaaaaaattcaaagaatagagacaggatctcactatgttgcccaggctggtcttgaactcctgtactcaagcagtcatctcacctgggcctcccaaagggcagggaagggattccaacatatgtggatgtcatcagttatttaaccagtccctagtagaggacacagatgtcattttccattttcaactctgcaaatgccatggtggtgtccatccccactggtcacttgtcagcagttgtccgtggaaggaattgccggtcaaaggttttcaactggtgtgatggtgcctttactgtcctgcctcaaagcaccgcaattcaggctcttgagccagatagctgcgtttgcatcccagctctgcggagcacccaaagcctgatgcttccatctcctccacctctgttcattaaaccagtgttccttgactacttactgtgtgccgggtgcaattaaccaacatacgttggtcgataaaacagaccaaatttcctccccatatagagcttccattctagtggtgaaagaaacaagaagcaagataaagtgtgtagtgtgtgtgcaatggtgataaataccatggagaagacaaagcagagaagggaatgggactgggcgccatgactcatacctgtaatcccagcactttgggaggcagagatgggaggatcacttgaggctaggagttcaagaccagcctggccaacatggcgaaaccccatctctaccaaaaaagatacaaaaattggccgggtgtggtggcatgcacctgtagtcccagctactcaggaggctgaggtgggaagattccatgcacccaggaggtggaggttgcagtgagtcaagatggtgccactgcactccagcctgggtgacagagtgagacgctgtctcaaaaaaataataattaaataaattaaagagaaggggatgggaagggtgatcatcacagttgaaatagggtggccaagtgaggtgttactaaggtgacatcccagcagaggcctgaaggagatgagggtgagctctgcgggtgcctagggggaaagcattccagcagagggaacagcatgggcaaacccatttctatccatcagtccctgcataagcaaacaccctggacacctaactggagagtttgaggaccaacaaagaggccactgtggatgcagaggcgggagcaaaggggagagtaatggaaaacgtgggcagaggtagcaggggccagatcacgtggggcctgtgacaccagaagacttcggtttaactctgagccaggctaggcccccagagggtactgagctgaggtatgggaactgacttagggttcacaggcgacctctggtggccatgtggggaacagacgagggggcgagggcagaaacggagcccagcgtggaggcggctgctgggggccgggatgcacagcgccagagcagggaggtaccgtggaagccctgaggagaggtgggattctggatggatcttaaggcggggccgacatgattggctaatgggttgggtgtgggcatgagaggaagggaagagttggggggcctccagagttgctctccgcttatgctatagagggcgtgagggtttctgggcacgtagtgcgtgctcaatcactgtcactccggacctgcagcagaggccacctcctcacctttctgtctctcccaggaccatgggtcccctgccaccctttgctgtggcccagggcgcccagctcctgatccgtcctgtggacaaaccaatcaacacaactttaatctgcaacgtcaccaatgccctaggagctcgccaggcagaactgaccgtccaggtcaaaggtgaggaactccctgggtgggaagaacagggaccaaaggaagaggtcgaggcagggttccctgtctaatgctctctggctcccatccttctcctaagccttctcacaaaaggaccagtggggccagctttactcccctgttaactccatacctatatcactggtaccgttgttcagctgcctggatacactccctccacacacacaggttgggatagatgtggaatccctctctctcagggactcaggcctttccaaatatattaggcagacctctatcaattgcaattgacagaaacacaaagtagtctaagcaaaaaaaaccaaacaaaacaggactttattgaaaattcaccttcaggtatggttagatccaggggctccaaccttgtaacccaggaacttttattttatacatctcttgtctctgcttttcgttatactggctttattctcaggcaggctctgaagcaagatggccctcggcagggacaggctcacattctaccagaatggcaacagcaggagaaaaaacataccactttcagtaactgtagccatagtcccagggctggctctcattggcccagcttaggccacagcccacctatgaaccaatcatagcagccagggagaatggaatattctgattggccaggcctgtgtcaaagtcccattctgggcaccagagggtgggatccattccacctgaattaaatagactgaggcagtggagtggtggctccctaaggaaattcaagatgccatttcaagaatgagggataaaccccaagagtttccttacctaaatacctgtttccttctctttcagagggacctcccagtgagcactcaggcatgtcccgtaacgccatcatcttcctggttctgggaatcctggtttttctgatcctgctggggatcgggatttatttctattggtccaaatgttcccgtgaggtcctttggcactgtcatctgtgtccctcgagtgagcatcaccagagctgccgtaattgagcacctactacgggctctgtgctgagtccttccagtgtgcctctcactgaatcctcaccccactgccatgaggtttcccccatttgactgatgagggtgcagagccagggagccttgttcactggttcattgattacatttacaaatattatttacagagtgggagaagagcgtatagggtcttaatgccatggtagggactttggaatttaattcaggtgatgtgggagtccctgccagatggatggagggtgaaataatgcttaagccctcagccttactccatctgccttgttcaggagtgactcctaggaggaggtggcaggaactggcacctctgatcctcagctctaaaagggtctgatgctttcacacctcaagagatttgcacaggccgttcccctgcctggagcaccctcccatggctccttctggagaagtgtgccagctcattctgtaatcagaggaacgatgctttgctgagcactgtctacatgccactttgtatgtataaccccctcgattttaatttttaattttttttattatttatgtatttatttatttatttttgagacaggctctcactgtcgcccaggctggagtgcagtggtgcgatctcggctcactgtagccttcacctcccaggttcaagcgattctcatgcctcagcctcccaaggagcggggattacaggcacgcactactatgcccagcaatttttgtatttttaggagagacagcgtttcgccatgttggccaggctggtctcaaacccctggtctcctgtgatccacccgcctcagcctcccaaagtgctgggattacaggcatgagccaccacacctggcctgtacaatctccttgaatgcccacaaccacccagcaaagtggttctcccgtgagccccatgttacagaggaggaagtatttgctttgagagatgaagttacctgccaatggtcaaacagctggacatggttgttggggagaagaagccagatctttgactaccaagcttttccttcaaccactaaacaaagctgctcccttacaacccaggcggatactgcctcgtccaggaagccctccctgacccccaagcatgagccaagcatccactaggctctcccactccagccttgcccattctgggtcatcaccgtgggggacttgtttgtcatccccagtggactgtgagccccaagatagcagacctgaggctgtcactgtcatgactgtgtccccaggaccgcctaccactgggccgggcataaaagaggcactcgaggaagtgtttgctgagtgattcaatgtgtcagctccagagccagactgcctgtatctgggccctaaagctactgcttgattagtgatgtcaccataggcaaatagcttaagctgtatgactcagtttcctcatctgtaaaatggggtgatggtacctaataatacagtagagcacttaacacagtaggtggcacatggtaagccacatactgagtatgtatttgctatgattgttattgctattattactattattgttattattaacataaactgcacaagagcaggctttttgtttgtttgtttgtgttttgttttgagacaagatcttgctctgttgcccagactggagtagtgcagtgatgtgatcttggctcactgcagcctcaacctcccaggctcaggtgattctcccacctcagcctctcgagtagctgggattataggcgtgcactcccacgcctggctaattttttatatttttagtagagatggagtttcgttgtgttgcccaagctggtctcaaactcctagactccagcaatccgcccacctcagcctcccagagtgctggaattataggtgtgagccaccacgcctggccaagagcaggcatttttatctgttttgttcacagctgtgtccccagcacctagaatgtacctggcacaaagtagacattcaccatttgctgaataatactactatttgctaaataaacccctgttgaatagtctaggaaactgaacacagagaggttaagtcacttgtccaagttcacacagctcctaaaggacagagatggaatttgaacccatccatctggttccagagccaggctcgatatttatggatatttcataaccaagtgaataactggatggctaaatccttagaaagcacaccctccatccctgtctgacacacgtgtataccattaagggaaatggcacccccatgtaatagcagaggcagaacttgacattttcagggccctgacacccaggcatgtcttcttcccatgcttcccagcattattccttcctgacgacttcccctcctatttccccaggtacagagcatgccagcgcctcagctaatggggtaagtgcagtgttggagctaaggagggtgtggggtctgcacgaactacagaccagacgtcttcagatgcccacggcccggcctcaggagcctgggtcttttctcctggtgcctcgagcagcatttcccaacccttcctgctgggcggaatcccctgtagagtttgctaagacgcagccccagacagtctggtctgtgatggggccagggaatctgcattttaatatccgctctctcccccctgccccacgccccttcaattccacccatggccacaccttgagaagcactgccctggcttccagggagagaggaggggacgggcctgcagttctttgcacatggggcttcagtgggaagatgtttgattttgttcaaaagagccccaaggctaaaatttgaaaaccctcttctagcatgtctcctattcagctgtgagcagagagaacagctcttcccaggatccacagacagagggcacaaggtgacagcgtcgggactgagaggggagagagactggagctggcaaggacgtgggcctccagagttggacccgaccccaatggatgaagaccccctccaaagagaccagcctccctccctgtgccagacctcaaaacgacgggggcaggtgcaagttcataggtctccaagaccaccctcctttcatttgctagaaggactcactagactcaggaaagctgttaggctcacagttacagtttattacagtaaaaggacagagattaagatcagcaaagggaggaggtgcacagcacacgttccacgacagatgaggcgacggcttccatctgccctctcccagtggagccatataggcagcacctgattctcacagcaacatgtgacaacatgcaagaagtactgccaatactgccaaccagagcagctcactcgagatctttgtgtccagagttttttgtttgtcttgagacagggtctggctctgttggcagactagagtacagtggtgagatcacagttcattgcagccttgacttctcaacgccaagtcatcctcccacctcagcctcctgagtagctatgactacaggtatgtgccaccacgtctggctaatctttttattatttgtaaagtcgaggtttccctgtgttgcccaggctggtcttgaactcttggctccaagtgatacttctgccttggcctcccaaagtgctgaattaagcagctcaccatccacacggctgacctcatacatcaagccaataccgtgtggcccaagacccccaccataaatcacatcattagcatgaaccacccagagtggcccaagactccaagatcagctaccaggcaggatattccaagggcttagagatgaatgcccaggagctgaggataaagggcccgatctttctttgggcaaggttaagcctttactgcatagcagaccacacagaagggtgtgggccaccagagaattttggtaaaaatttggcctctggccttgagcttctaaatctctgtatccgtcagatctctgtggttacaagaaacagccactgaccctggtcaccagaggctgcaattcaggccgcaagcagctgcctggggggtgtccaaggagcagagaaaactactagatgtgaacttgaagaaggttgtcagctgcagccactttctgccagcatctgcagccactttctgccagcatctgcagccagcaagctgggactggcaggaaataacccacaaaagaagcaaatgcaatttccaacacaagggggaagggatgcagggggaggcagcgctgcagttgctcaggacacgctcctataggaccaagatggatgcgacccaagacccaggaggcccagctgctcagtgcaactgacaagttaaaaaggtctatgatcttgagggcagacagcagaattcctcttataaagaaaactgtttgggaaaatacgttgagggagagaagaccttgggccaagatgctaaatgggaatgcaaagcttgagctgctctgcaagagaaaataagcaggacagaggatttgctctggacagagatggaagagccgggaacagagaagtgtggggaagagataggaaccagcaggatggcaggggcaaagggctcaagggtgaggaggccagtgggaccccacagagttggggagataaaggaacattggttgctttggtggcacgtaagctccttgtctgtctccagcacccagaatctcattaaagcttatttattgtacctccagcggctgtgtgcaatggggtcttttgtggaaatcaaggagcagacaggtttcatgtgtactgtcaccacgtgggatggaaccagaggcatggaagcaagacgctaaatgaagagggccataagggctgggattcccaggcaccttaggaacagcttgtctttttttttttcctctccaaaaaaaatgtttaagggacggtgtctcctgtcacccaggctggagtgcaatggcacgatcatagctcattgcagcctctaactccggggctcaagcaatcctcccacctcagcctaccaagtagctgtgaccacagctgcccctcaccatgctaagctaatttttttaattagatagtacataaacgtcccaaaattagaagataaaaagacatgagggatccattctaatttgtgtttggagtgtaatggtccagctccattcttctgcacatggatatccagttttacacaacactgtgaatgtaatgaatgccactgaatcatacactcaaaaatagctaaaatggcaaattgtctgttatctctttttaaccaccatttttgaaaattaattataccaaaaaaccattgaatagtgcactttatttatttatttatttgtttatttatttatttattttagaaataagagtctcactttgttgcccaggctggagtgcagtggcgtgatcatggctcattgcagcctcgacctgctgggctcgggctatccttccatctcagcctcccgagtagctgggactataggtgggcgccaccccacctggctaaatctctttttaacttttgtagagataggcatctcgctatgttgcctaggctgggctggaactcctgggctcaagtgctcctcctgccttggcctcccaaagcgctaggattacagatgtgagccaccgcgcccaccctgaaccttactttttttgctcagtttctggtaattcagagaatgcctcctgagttgttctacacccacctcatattccatgggagggctgtacagggcttttttaacgaggcctctaaggacaggcatttgtatcctttccagcctttcactattacaatgttgtagtgaataactttacacactgtcatttattttacttttttttttttttattttagagaaaggaatcttgccatcttgcccaggctggtctcaaattcctgggcccaaacaatcctcccgccttggcctcctaaagtactgggatttataggcataagccaccgtgcctggccaatgcacactgtcatttagctcatgttaacacctgagtgtaggacacactcctggaggtggaattgctgggccaaagagtatgtttcttgtcattgtgatagatattgacaaatgaaccctcacagaagttgtgctgagttctgttcccaccagcgacgtaggcgatgacctttttctggagggagggggcatccttggagtccacagagccaggaatggagagtgggcccagaattttggtataggtgttgtataaacttatagtaaggttaagaaaaccgcaactatccttatcagagacttggcggggggcagggtatgatggagatcataaggaggctaaaacactccacaccctccctctgcattgctcctgcacgggagtcgggaatcttttcaggttgatacgatctcaccttgaggagctgtgaggtcccagaagcctctgggttgcagattgcttggggtgaaaatg[136 bp omitted]aaaccgtgtctctacaaaaaaaattagccaggtgtggtggtgcatgcttgtaatcccagctactcagaaggctgaggtgggagaatcccttgaacccgggaagtggaggctggagtaaaccatgatcgagttactgcactccagcctgggtgacaagagtgagactctgtctccaaaaaaaaaaaaaaaaaaaaaaaaactggattgcctggctctactccgggcacagcatgcaggcccagttctgctgctctgctgtttgttctgctttcctccacatattggcatcaccctctggtgccaagatggctgctgcattccaggcatcacatccagactcagacccagagaagctgcccatccctacctgggtgagcctttgtaggaacgagaaaccgcatccagcagcagaaacctcacccagcagcgtcttttccggtctcattcaccagcgccgcccaccgctcaaccaatccctggccaaaagaatgggaccgcctggaaggctggaccaaacaggacctgccctctggggctggggagaggcccagatgaaggctgcaggacaggatggactcctagacctctgttaccagcagtgactacctctgtctgggtggttggaacatgtttgaattttattctaagtactgtctacaagttctgcaataaaccttgactcttcttttaataatgcaaaaggaatcgaagtgattgtttgaaagggagaggaagaaagagagagggagggagggaagaatggagggaggcagggaaggagacagagagagtagaatccagccaccggaaaatccagaatagctggctttgcttaatccatgcctggaaataactgctgggtttgcaacaacttctctcccggagacagaccaaggaaactacaaaactgcaggaaggattgaagggccgggcacagtggctcacgcctgtaatcccaacactttgggaggccgaggtggattggatcacctgagatcaggagttcgagaccagcctggccaacatggtgaaacctcgtctctgctagaaatacaaaaataagccgggcgtggtggcgtgcgcctatagtcccagctactcgggaggctgaggcaagagaatcgcttgaacctgggaggtggaggttgcagtgagctgagatcgtgccactgcactccagcttgggcgacagagtgagaatctgtcaggtggattctgagggtactctgaccccacgaacccagcatgaaatcttccaggcattaaggaacattgaggatgtggaggattggaaatccctccagggaaaatacacttctcttgagcagggtcacgaggggtgggggcaatgtgggaggtggggcaaatccaaagacaaggtcaacagcaataataataataacaatgacaggcatttgttgcttgttggctgggcctcttgcatacagttctcccaacatccctgtgaggtggtgatgcttatccccattctccaggggaggaggctgaggcccagagaggtgaagtcgtgtgccacaaaataccccagccatatggtggtagaaccaagttttcagccagactcaccagctcacagcagagctgccctggactctacagccattcagtgtatagctgggccactccatcattcaaggcagttcaacgtcaagattcctgatttgcctcaacctggggcctctagaagataccatcacccccaacaagctgaagacgtgtgtccggaacactcagacacacacaaagtgctatggatacaccacaccccgacctagctgtctcttcctgatggacctcactgggtagaaatgcctggcaccgcctgcctcagatccctaggtcagctctcactccccaatagaagtttctgagatgatgatgaaaacgttctccatctgtgctgtccaatggagtagccactgatcacttgaggctagtgagcacttgaaggtggctagtttgaggaactgcattttttaatgcatttaattttagttactttgaatatatatacacatatatacatttatatatacatattcatacacatacattttacatatattttatatgtatatgtaatatatatataaattatatatgtatatatttttatatataaatatatattatatatttataaatatataaatatataatatatattatatagatatataaatataaatatatattatatatataaatatataatatatattatataaatatatataaattatatatttatatatataatatataaattatataaattatatatatttatatataatatataaatatatataaattatataatttatatattatatataaattatatattttatatataatatatacaatatatataaattatatataatatataaatatatataaattatatataatatataaaatatatataaattatatataatatataaaatatatataaattatataaatctatataaatatatactatattataaatatagtatatatttatatagatttatattatttatatagtatatattatatatttatatgtttatgtatatataaatatataatatataaatatatttatatattatatatttatataatattttatataatatgttatatatttttatataatatattatatatatttatatgctatattatatagtatattatatataatatattttatatattatatatatatttatataatatttatatattatatttatataatatgtttatatattattatatttatataatatgtttatatattattatatttatataatatgtttatatattattatatttatataatatgtttataatatatataatatatttatataatatgtttatatattatatatataatatatttatataatatgtttatatattatatatataatatatttatatattattatatatattttataatatataatatatataatataatatatatattatatatattatatatattatatattagttataatataaatatataatatatgtatataattatataattatatacatattatatatgtatataattatataattatatacacatattatatatgtatataattatataattatatacacatattatatatgtatataattatataattatatacatatattatatattataatatattatatattatattatatattataatatgtatatataaatataatatataatataatataatataatatatataatataatatataattatatataatatatattatatataaaataatatatatatattcagtttttttttttggagatggagtcttgctctgttgcccaggccggagtgcagtggcacaatcttggctcactataacctccacctcccaggttcaagtgattctcctgcctcagcctcccgagtagctgggattacaggcatgcgccaccacggccagctaatgtttgcatttttagtagagacagggtttcatcatgttgcccgggctggtcttgaactcctgacctcaagtgatctgcctgcctctgcctcccaaagtgctaggactacaggcatgagccaccacgcctggcctattcagtatatttttttgagacatggtctcactctgtcacccaggctggagtgcagtgtcatgatcaaagttcactgcagccttgacctcccaggttcaacaatcctcctgcctcagccttctgagtaactggaactatagttgaaagccaccaagcctacctaattttttaaatttgttttgtgtaaagttggggtcctactatgttgcccagcctggtctccaattcctaggctcaagcaatcttcccacctcagcctctcagaggggtaggattacaagtgtgggtcacctgtgcctccctaaatttatatttaaatagccacatatgactaatagctatgatattaaacagcataacactagaccctccattatccaagctctgttgatccaaccaacagagcacatttgatctctcctacctcccagcctcacacacacaggccccacaccctccttcctggctccactcacccaagatattgcaacctcctcaatacaccttgatgactatctcagcctccacatccttgcattgctatttatgctgcctggtgcacctcatgctgcctcaccccatcatctgcctcatttctactcttactccaggtctcagctcagatgccccctcccccaggaagccctccctagccgtcaggttgaatgaggtgtgtctccttgggctctcccagactcctgggctcctccatcccagccctgatcactctggatcataattgtgtgagaggggtctgcccccccaaaccctacaggattgtgtgccctactgtggacagagggcagagcagaggtggtctcaatcatcactgtgtcaccaacatcacccagcacacacaactgggcactgggaatgtgtgctggaatgaatggaggatgctttttaaaaactaggctaagccaggtatggtgagtcacatctgtaatcccagtactttgggaggctaaggtgggaggatcacttgagcccaggagttcaacaccagcctggggcaacatagtgagatcccatctctacaaaacatataaaaattgaccagggatggtagcacacaactgtggtcccagctactcaggaggctgagacgggaggattgcttgagcccaggagttggaggctgcagtgagcaatgatcatgcaactatactccagcctgggcaacagagcgagaccctgtcttaaaaaaaaaaaaaaagaataacacacttggaataaacatgatccaaaaaagtacaaaacatacactctggggctgggtgcagtggctcatgcctatactcctagtactttgggaggccgaggcaggaggatcatctgaggtcaggagtttgagaccagcctggccaacatggcaaaaccccatctctactaaaaatacaaaaattagccaggcatggtgacgcatgcctgtaatcccagctactcagaaggctgaggcagaagaatcacttgaacctgggaggcggaggttgcagtaaactgagattgtgccactgtactccagcctgggtgacacagcatctaaaaaagaaaccaatccaaaaactacaaaatattcttgcaattataggtgacatatttaaatggtaagacaaccaatgttcatgaatggaaagacagagcaagaccctgtctcaagaaaaaaaaaaaaaaaaaaaaaaaaaaaaaacaggctgagcgcggtggctcacacctgtaatcccagcactttgggaggccaaggtgggcagatcacctgaggtcaggagttcaagaccagcctgaccaacatggagaaaccctgtctctactaaaactacaaaagtagccgggcgtggtggcgcatgcctgcatttccagctactccctgaggtgggaggatcgcttgaacccaggtggcagaggttgcggtgaactgagattgcgccattgcactccagcctgggcaacaagagcgaaactccatctcaaaagaaaaaaaaagaaaaacacgaggctaagagcttttttttttttttgagacgaagtctcgctctgtcacccaggctggaatgcagtggcgcgatctcggctccctgcaacccctgcctcccaagttcaagtgattctcctgcctcagcctctccagttgctgggattacaggtgcccaccaccacgcctgactaacttttgtatttttagtagagacagggtttcaccatgttggccagg[131 bp omitted]tctgtctattggcagacttgcctcttttcctgggcctctgtttccacatctgtgcaatgggaacagttatttatggtggctgctgaatgaggcagtgtgtgtttgaacaaacccaggggaattgttcaaacagaggctgttatgactattgctacagtgactgctgttgtagtcacgctgagtgagaaaaagaggttgaagagggtcaggggaggagtcctgggaagttccccagtcaccctgaaaaactggttcaacctctgtctgtgctcccatcccagggagtataggtggagcctccagagcccatggacagggcatgctggggctgggccagccccagcggtgtctctaaggcacccctgggatccccactgagctggcctacttcagacagccagggcccacccctctggcccccttagtgtccagctcgtggccccttggcatttccacaagacgccaagatggagattcccatggggacccagggctgcttctcaaagagcctcctgctctcaggtaaggaggaaatagaccctaaaggccaaggggagaaatggggactcagcccagagattgaagtttcctcttagaagtagggaaagattacctgagaggatgaaattagaataagatgggggaggggcaacagaatcacagcctcattgccattttatctatggaattttctataatgttaggaccatgaaggcaggaatttatgtatgtttggttccctgctatatctccagtgtctagaaattgaaggaagtttagatgtattacatatagttggtattatagcttatatattacatatgcctataagtattggttgaataaatgaatgaatgaatgaattcagagagtccatgtgtttagaagcaggccacacagcatctcaaggtagaaaaacctctggatcaacaggatggcaaatctgtggtaaccatgcctgtgttcccactcctgcacccagggcagacatcactaatcaatcccagcattgtttccaatgagcagcactcagagtccttgctccccgctgaagatctgtatctagagaggagcatgccatggtccctggcaacacccctgatctcagcccttccctgtaacttcccacagcctcaatcctggtcctctggatgctccaaggctcccaggcagctctctacatccagaagattccagagcagcctcaaaagaaccaggaccttctcctgtcagtccagggtgtcccagacaccttccaggacttcaactggtacctgggggaggagacgtacggaggcacgaggctatttacctacatccctgggatacaacggcctcagagggatggcagtgccatgggacagcgagacatcgtgggcttccccaatggttccatgctgctgcgccgcgcccagcctacagacagtggcacctaccaagtagccattaccatcaactctgaatggactatgaaggccaagactgaggtccaggtagctggtaagtgttagggtctggggatgaggtgaggaagctaatgagccctgagcagctaccatgcaccaggtgctgtgcaaacaccatttcatttggtcctctcatttattcacttgacacatattgagcatctactgtgtaccaatccccagagatagtctttaaccctcacatgcattaactaataaaatatctatgaaatgcccgccttgtgcctgacactggagaatgcaccatctcatttacctttcacatgcactaacattaaccaaatttttatcgagcacttactgtatgcctggttgtgaggaatgcatccctcaatctttatgtttataaagcgagtatttactgatgaatccactcggggcaaagtgtgagggaaagggtggtgggcaataatgacagctggcatttcttgggtgatcgttaagagccaggcaccatcttaaacattttccctaaagcatagtttctcagcttcagcactactgatgttttgtattggccagttcttactagtagagggtttgtgcattgcagagatttcagcagcaccccggcctctactcactaggtaccagtagcagcttcctagtcatgccaaccaaaaatgtcttcagatattaccaaatgtctccaccctgggataagaatcacccctggttgagaaccattactctatatttactcatttttaccttaaaacaactccatgaggccagcgccattattgtctccattttacagattgaaaaatggaggcacgcagtggttatgacttgctgagtaaagaatacgaaccagaatgatgtgacatgggaaaggaggtcatcagggagacctcactcaagaagtgaccttagaggagagaccagaagaaggtgattgagggagggaggtgctgtggccccttgccatttccacaggacacagatccccttagaatttatatgttgaaatcctaacctccaagatgatggtattaaaaggtggggcttgggcctggcacggtggcttacacctgtaatcccagcactttggaaggctgaagtgggtggatcacctgaggtcaggagttcgagatcaccctggccaacatggtaaaaccccgtctctgctaaaaatacaaaaattagctgggcatggtggtagatgcctgtaatgccagccacttgggaggcaggagaatcacttgaacccaggaggcagaggttgcagtgaaccgagatcatgccactgcactccagcctgggcaacagagcaagactccatctcaaaaaaaaaaaaagtggggcttgtgggaggtgattagatcatgagggtacagcacttgtaaatagattgtatgcccttatttttttttttttcaatttaaaagcaagattgtggagacagggtcttactgatattgctcaggctggtctcaaactcctggcctcaagcaatccttccaccttggcctcccagtgctgggattacaagaataagccaccatgcccagtctcagctcactgtaacctccacctcctgggctcaagcgatcctcccacctcagcttcccatgtagctgggactgtaggcgcatgccatcacacccagctaattttttttatttattggtagagactgggtttca[142 bp omitted]aaaaattttacagaaatggatgaaataggcaaaagtcaactcaacatatgcattaatttgattacacaaatctgcataaaatgacactctagtccggttggagataacagtccttacttcacttgtggagcctgaagtgacttctccccacatttccggggttcccaggtcacaggtgccccctttggaagctgcacagcatggtcattaaggagttcaggtggcctgggtatgatcccagcactgcacttattgtgagccatcaagcaagtcaatttactgttccatgcctcagtttccttatctgtaaaatggcatagagcttacttctttgttggatcattcagagaacagcgtgtgtgtgtgtgtgtgtgtgtgtgtgtgtgtgtgtgtgtatttcaaacttcataacaaccctaagaactaggtattcatattatcctcatttcacagacgaaccaagtcacagagagattgagtaatttgcccaaggccacaccgccagtgggcagcattaggatcccatagtctatgagcttagctgccaagacgggttgggatagaacagatgtccagcttgagagtaaagctgggaggtcagagggtaagagccaggtaggcgtggtcttaattctagcaagtccagtttaagaatcctccaagtcccctacatctcctgcaaaacacagcccagaacctcatccttctgctgaagggattcaggtatcatcaaccgaagtgagaaaaagcaaagcagattgggtctgggctcggtggccacgtctgtaatcccaacactttgggagaccaaggcagtagaactacttgagtccaggaatttgagaccagcctaagtaatttagtgacaccccttctttacaaaaaatttaaaaattagccaggagtggtagtgtgtgcctgtagtcccagctacttgggggactgaggtgggaggatggcttaagccgaggagttggaggctgcagtgaaccgtgatcatgccactgcattccagcctgggcaacagagtgagacgctgtttcaaaaaaagaaaaaaaaaaatcagtttgatggggtagggttggggagcatgtcagcaagcagattttggatgtgctgaggatcgtatgaaatcctagggaagcagcaacatcgagatataggacagctaaggagttccatctgggacatgttgaaattttttttttaatagagatagggtctcactatgttgcccaggctggtcttgaactcctgggctcaagtgatcctcccccatcggcctcccaaattgctgggattacaggtgtgagcaccacgcccagcccgctgggacatgttggattttatgtgccacccagatggttggatactcagatctgaaaagcaggagaaagctctgggctggaaataggaaactgcacctcagttctccatgcagtcactgatatagtcggtgagggactgggggagccctcaggagacatcgcacagtcccccctctctctttctttctctcacccctcagaaaagaataaggagctgcccagtacacacctgcccaccaacgctgggatcctggcggccaccatcattggatctcttgctgccggggcccttctcatcagctgcattgcctatctcctggtgacaaggaactggaggggccagagccacaggtacagggtccccaagtgtccctctcctgtctgctcccactgtcttctcaagccccatggattcttccacaagtcacatcatccggctcatacacaatctcatcaaatcttggaactcctggggtgaaaagaatctttctatcctgtattaaacagaattctgcattgcaagggacagaaaacctattcttaaactgacttaccaaaaagaaggaattttagtcagggtctcgctctgtcacccaggctggagtgcagtggcacaatcacgactcactgcagcctcaacttccccggactcaggtgagtctttcacctcagcctcccaggtagctgagactacaggtgtgcaccaccaagcctggctaattttttttatttttgtagagatggggttttgcccaggctggtctcgaactcctgggctcaagtgatcctccagctttggcctcccaaagtgctgagaatacaggcatgagccactgttccctgcccaaaaaacaaggaattgtttaatactacataacttattcaggtaggctgcatccaggggctcaatgttctcaaatgactcctttatatactcgtcaactctgtatttttcttcggtggcttcattctcaggcaggctctcccctgttgccacaagatcactcccagggggcccaggctcatactccactggtttagccattcctagcaaggagaccaccttgttcctggtagttccaacaagagccccaagtctacctctcattggcttaactcagatcacatgacttttcatgaaccaatcactgtggccaggggttggtggccagggaaagctctgattggccaaagttgggctatttgtgcagccccagagactgggctagatccaactccgtttaatcaagtggattgagagtgtagaccggctctccaaaggaaaacaaaactggttgctattgtcaaagaaggggagtgggcagcagcaggcacagctatcagatgctacctacttgtatggagagagagagagagagagagagaggagagagaggagagagagacagtcctgtttcccccagggagagtctattcgtgaaaaattcctttcttatgacatcagcgtcttcagaactttgtctcttgaaattgattctgaactgattgtagataagatgtctaatttttctgccactcaccagttcccagaatatgaaagcagcaattttgtctcctttctcaactcttccttatgtgccatggattctgttttcttcttcttcttttttttttttgagacagagtcttgctgcagtgtagtggcgcaatcttggctcactgcaacctccacctccgggactcaagcaattctcgtgcctcagcctcccaagtagctgagactacaggcgtgcaccacaacgcccggctaattttttgtattttagtagagatggggtttcaccatgttgccctggatggtctcaaactcctgatctcaggcaatccgccagcctcggcctcccaaagtgctggaattacaggcatgagccactgcgcctggcctatttctttttcttttttaaagagacagggtcttgctttatcacccaggctggagtgcagtggcatgatcatagtttactgcagcctcagactcctgggctcaagtgatcctcccacctcagcctcctgggtaactgggaccacaggcctgtgctaccacacctggctaattatctgtattattattttttgtagagatggggtcttgctatgttgcccaagctgacctcaaactcctggccttaagcggtccttctgcctcagcctcccaaagtgctcgaattacaggcatgcatcaccatgcctagcttattttttactttttgtaaaaataagatctccctgtgttgccctggctgtcttgaattgctgggctcaagccatcctcccatctcagccccccaagtagctgggactacaggagtgcaccatttccaagcttttttttcttcttcttcttgttttgctcttgtcgcccaggctggaatccagtggcgcgatctcggctcactgcaacttccgcctcaggggttcaagcgattttcctgcctc[134 bp omitted]tggcctcccaaagtgttgggattacaggcatgagccactgagcccaattactatttttttactcaaaaccgcacacacaccttccaccccctcccccctctccattttccttcatagggaaggatgttgctctctgatattctactgtcaatgctttattccaattttcttcccctctctttccaccctagactgcctgctccgaggggccagggatctctgtccatcttgtgctcggctgtatccccagtgccttcagtgacgcccagcacatggttggtgcttgtaaatacttatttagtgaactaacaaacttgctatagcggtgtcaagagtacttttgttttcagagtcaaagtctcactctgttgccaaggttggggtgcagtggtgcgatcgtagctcaccgtagcctcgacctccctggttcaaactatcctcccacccgagtctcccaagtagctgggaccccaggtgtgcaccaccacacctggctaatttttgtaatttttgtagagacgggatctcactttgtgagtcaggcaggtctcaaactcctggcctcaaaaaagtctcctaccttggtctcccaatgtgctgggagtatagtcatgagccatttcacttggttccagtgtacttttaaaattaagggtattcaggacgggtgcagtggctcatgcctgtaatcccagcactttgggaggccaaggcaggtggatcacttgaggtcaggagttcgagaccaacctgatgaacatggtgaaaccc[217 bp omitted]gaggcag[153 bp omitted]atcccagctacttgggaggctgaggcaggagaatcgcttgaacccaggaggcggaggttgcagtgagctgagatcacgccattgcactccagcctgggcaacagagcgagactctgtctcaaaaaattaaaaaataaaaaataaataagggtattcaaatgaatctatgtaaagagaaatattaaggaaatcataagacaggtggatgaagcaggatcatttaggtgatctctgtaaatggtgatgtctggggaacactattcattggcataaggtggtggctagggaaactgagggattgcggatgaggattatggaagaaaagtctgggatagttcaggcctcatcctagctcactctgaaggagagaccatgtggctttcagggacctggtgggatttccagcttctcttaagtctctctccccccgcctgagtgtctctctatcctaatatcaattccctctatgtgtccccaggatggcgaccacagagaagccagaattgggccctgctcatgatgctggtaaggcgggagccccagatctcactacctagccctcctctcagctcctcctttctcccctatagccacaagcccgcttattctccctcactcagagacctcccaatgcacctgccccgagacctctctggggccccctgaactcacccacataatctgagcgcatcggcacccaccccaaacctgctttttctcttcttctcagtggctagcatccccatcccatcatgcaagtggatcccatccacctccacaggccactaccagcctcctagaccccccacacccagctcctcactggtctcccagcctccagacccctccaacccatcccaggacaaggtctttctaaaattctgatcatgttactcctctgctcaaaggccctccatggctcccctgtgcccttgggacaaagtttagtctccttaacatggttctcaaggcccttcacaagacagatcaaacacagtttctgaaacacagctggctctctcaccagacctctgcactcaccctctcctgccttagcttcactcacttctctctactatctcagatgccccctcctccaggaagccctcactgagtcctaggctacttaggcaccccgtcttgggctcccacccgcccccagtcccccgactccagccctaaacactccaggttgtcactctggagactggtctgcgtcccccactggactgtaagtcctggaagggcaggcctgggactgtcgtggtcagcactgtgtccccagcactgggtttggctagaagaagcgtttgcacaaatgttagttgaataaataaataaatgaatgtcaacaggcagtcagagtggcctgtggggcccatgtgtcagctggtacctcccctggcctctgtttcaggtgacaacaacatctatgaagtgatgccctctccagtcctcctggtgtcccccatcagtgacacaaggtccataaacccagcccgggtgagtcccgtccccagcctctcccctgaagccaatgctaacaggcgcctcctctctgagctggctgtggtcctctgggccatcttgacaccaggtttgggaatctcaactctctatatattgttccctgtttttaaaaatcctaaggaaaagagactggaaggaaacagcacaacagaagcagcatttgtctccggggtgtggaggctggtgggtgggttttatcttcttttcttttatacttgtctgtgttttctgcactgagcagccactacctttataatggggaggttttatatatatataacgaaaggtttataaaaatgagtcatttaggctgggcgtggtggctcacgcctataattctagcactttgggaagcca[134 bp omitted]gaggaaggagaatcgcttgaacccaggaggtggaggttgcagtaagccgaggtcatgccactgcactccagcctgcacgacaggagcgagactccatcccaaaaaaaaaaaaagttatttagattaaataaaaagagaaacttagctgggcatgatggctctacacctgtaaatcccaacactttgggaggccaaggtgggaggattgcttgaggccgggagtttgagaccagcctggggaacatagctagaccccatctctacaaaaatttagctaggcatggtggtgtgcacctatagtcacagctaccagggaggctgaggagggaggatcacttgagcccaggagtttgaggctgcagcgagtggtgattgcacaactgcactctggcctgggtgacagagcaagatcctgtctttttctaaaaaagtgaaaaataagagaaacataaaacactaaggctaagagcttagaaccagaggtgttgacaggggtagactgagagttaatggagtggttgacgggccactggataccacacgaagctggggcccagtgcccatttgtcagaggagaacactgaggtgtaaggaagctaatcccctctgcccaggggcctcacagtctgggaggggtgatggggacttggaatctgagactgtcctagcaccaaaggtcaaagtttagagggtggggggtgccgagcgcccactcacccgtgtccttcccttgcagcccctgcccacacccccacacctgcaggcggagccagagaaccaccagtaccaggtatggagctgggagctgggaggggtggtggggatcccacggatccaggagccccgaagccggggtggggaggggtcaagacaactgaaactgggggctttcctcccctcgtccccccaagcctcacggtctctgctctcgaagaagcccaaaccgcctccctgagagaccctggcaagtcccttttcctcccaaggctgcaatttccttctttgcaaaagggatccaaaaccttgaacttgcacaggaggaacaaggcccagagagggacaggggattgcctggggccacacagccagtcaggtccccagtgaaaccccaccgcagagctcagtccctctccatcccctcctgtcagctgtctgtccctgtagttctgtctctctctctcagtggcctacatatgtctgtatgtctgtcttcccctttcttggactctctctctctctctctctctctctctcagtttctcttgctgtgtcctttttaatctgtctttctgtttccagtttgttcatgctgccttgtctaagatgcatctctttacatgtcttcgtttctctgcatctctgtctctctctctctccattctctgtctctcctgcctctttgtctctgtcactgtgtccacctcatttcttggctcttccaggacctcttgtctctgcatctcactctctttccaccttgctcttccattctctctgcgggtttctctccatctcacgctgtctctcatcctctgtccctctctgtctccccaagactctccccctccacccagtcataattctgttctctcttccccccaagcaggacctgctaaaccccgaccctgccccctactgccagctggtgccaacttcctgatgggtcctgggccaggccagccagggagaagacaaggccccagccctcctctgggagcctcacacctgagaccagcaggacaaggccattgggggctgtggggccgatgaggtggactcagccaaagactcagcagcacatggggcaggtgtcctggcagggggacaggagactgtaacaggcccaggtccttgtgcagcccgtgaatgcacgcccgccttcggtctgttccttcaagcaagctggcctgggccatgtgcctgtgaaaggcaggctctggcccctttccatgccaaagtcccccaagatctggatatctggggacaagatggtggcctcaggcctgcctcccaggcagttggctgggctcccaactgtctgtcctcaatgccctaccccaactccactagtgaccctcagagtcttctccccttaggacaaggcagacaccccaccatgcgggcctcaggtggcagagaggcccagcctcacaggcctgtggccccacacaccagtcccagcaaggtgaccacggctgctggaccccttccctgttcaggcaggcccagcccctctcagaacctgctgccagctgctggtcttggcccccaccctgaatcttactgagtccctctgggcagcagctcccttctccaccccaccccagcacccgtcccaaatgtggcctcagcttgtcctccccttccccaaactatgcattcattcagcaataaatgagcctttgctgtatgccagacccagttctaggctcttgcagccctggtagaaagcaaaacaaaaactcccgctttcccagagggtcacttggcaggggaaagaatcaggaaataaaataaataatgaacatgcgttgtctgtcagatggggataagtgtattggggaaatggaggggggtcgagagtattgggggactgagatttttaattagggcacagaggtcctcgctgagaaggtgacaaatgagcaaagacttgtaggaggggaagaaaggagccatgtggggctctggaggaagagcattccagacagagggaatagccagtgcaaaggccctggggcagaagcatgcctggcatattcaaggagcagcaagggggctgggcatggtggctcacacctataatcccagcactttgggaagccaaggcaagcagatcatttgaggtcaggggttcaagaccagcctggccaacatggtgaaaccccttctctattaaaaatacaaaaattagccgggcatggtggtgggcacctgtaatcccagcaactggggaggctgaggcaggaaaatcacttgaacccgggaggcggagtttgcagtgggccaagatcgtgcccctgcactccagcctgggtgacagagcaagactccacctcaaaaaaaaaaaaaaaaaaggagcagcaaggaggccagtgtggtggagagggtggggaaggaggaaaaggtgggtggaagttgacgtcaggagatggacggaggggcacatggcgcagggccaggtaaggcactgccgagactgtggctttgaggggcagggtgctgtgaaaggcgaataacggccccccagtgacgtctacatcctaatcccctgtgaatgttacgttatatgacaaaagaatgcagccatgattaagttcaggatcgtgctttggggagattatcctggattgccctggcaggctctttatgtaatcacacagatccttataatcgagaaggacacaggaagcgtgagtcagaggggctgtgacaacaaaggaagcaaagccctttgaagacgggagaaggagctgaaagtcaagcagcacttcagagtcagaatgattgagtgtgagagagtccatgggccatcgtgagtgttgaagacggaagggggccttgagctaaggaatgcaagaaacttctagaagctggaggagggccaagctcagtggctcacgcctgcagtcccagcactttgggaggccaaggtgggaggatcgcttgaggccaggagttggagaccagcctgggcaacatagcaagaccccgtctctacaaaaaaaaaaaaaaaaaaaaacagaaccgagggtggtggctcatgcctggaatcccagcactttgggaggccgagacagggggatcacctgaggtcaggagttcaagaatcagcctggccaagatggggaaaccccgtctctaccaaacatagaaaaattagccaggcgtggtggcgggtgcctgtaatgccagctactggagaggcagaggcaggagaatcgcttgaacccaggaggcggaggttgcagtgagccaaggttgcaccattgcactccagcctgggtgacagagcgagactctgtcttaaaaaaaaaaaaaaaatcagaattgaggaaaggcaagaaaatggattttcttcctacaacctccagaaagcaacacagtcccgctgaaaccttggctttagtgcagtgagacccattttggattcttgacctccagaactataagataacaaacttgtgttgttttaagccactaaatttgtggcaattttttacaggaaatgggaaactaatctagaggatgaggaagaaatcacagaaggagaagttgcgtctcatgctgactcagtatgcaaatactctctgggagacttctccatcctcagaccgctccagacaccaaatgcctgggcctttgaccgccttgctaagagggtcaaccaagccagccaggtagccagggctcagggctaggagtgtgaggggattccatcttttctctctctttttttttttttcttttttgagacttttcttttttgagtcttgctctgtcgccgaggctggagtgcagtggtgcgatctcagctcactacaacctacgcctcccaggctcaagcaattctcctgcctcagcctaccaagtagctgaactacaggtgcacaccacctcacccggctacttttttttttttttttgtattttcagtagagacaagtttcaccatgctggccaggctggtctcaaactcctggctctgcagacaggaggactgaaatccatggtggcagacgcctataatcccagaactttgggagaccaaggcagacggattacttgaggtaggagttcaaggccagcctggccaacatgctgaaatacagtctctactaaaaatacaaaaattagccgggagtggtggtaggttgagacaggagaatcgcttgaatccgggaggcagaggttgcattcagccgaggtcatgccactgcactccagcctgggcaacagagcaacactctagaacaaaacattgacagaatttgtttctggtttggatacaggggattggagagaagagtgtgccaataattggtttgttcatcaattcaatgaagatttattgagcatctgttgtggacagccctattctaggttctggggagacagccatgaatgagacagtgatggctgcttttggagagctgaccttctagtgggagacaggccacagaaaaacaaagcacatggaacataatgtcagggatgacgatgctgtgaaggaatggagcaggtgctaagaacctactggaacgggcatgcttaagaggtgctggagagggtcaactcttgggtgactgcttcgagcaatgggagggtggggagcaggggtgttgtacacactgcgacagggccaggtttgcaaaagaaatcaagacatggccacacaaacacttctgtgtgactgttcacagcagcattattcacaatagccaaaaggtagaaataacccaaatgcccatgaacagacgaatgagttcttttgtttatttgttttgttttgtttttgtttttgagacagtcttactctgctgcccagactggagtgcaatggcgcaatcttggctcactgcaacctccacctcctgggttcaagccattctccttcctcagcctccggagtagctgggactacaggcgcccaccaccacgcttggctaagtttttgtatttttagtagagatggggtttcactgtattagccaggatggtctcgatcgcctgacctcgtgatccgcccaactcggcctcccaaagtgctgggattacaagcgtgagccaccgcgcccggcacggtatttttactgtatcttttctatgtttaggtacacgaatatttatcattgtgctacaattgcctacagttttcaatgtagccacaggctatgcaagtttgtcacctaggagcaatagcctgtacctataccctagatgtgtagcgggctctaccatctaggtttgtgtaaacacattctgtgatgttcacacaacaatgaaatcgcctaaagactcatttctcagaacatatcctcatcatgaagtgacgcatggctgtattatccagtggaacattattcagccatgaaaagaaatgaagccctgacacatactgcagcaaggatgaccctgaaaacgctgtgctaagtgaaagaagccagacgcaaaggactccatatggtagggtcccattgctatgaaatgcccaggcaattcatcaagacagaaagtggatgtagtagttgttgggttgggaggaagggcggaatggggaagtgactgctcatggatacaagctttctcttaggggtgataggatgttctcaatgttttgtttgtttgttttcttttgttttgttttgttttttgagatggagtcttgctctttcacccaggctggcatgatctcggctcactgcaacctccgcctcccgggttcaagcgattctcctgcctcagcctcccgagtagctgacatcacaggtgtatgccaccacacctggctaatttttgtatttttagtagagacagggtttcaccatgttggccaggctggtctcgaactcctgagctcaggcaatccgcccacctcagcctcccaaaatgctgggattacaggcatgagccacggcatctagccatgttctcaaattgattgtaacgatggctgcacaactctgtgaatttactaaaagctattgaattgtacactttattttggttttgttttcattttaagagacggggtcttgctctctcgcccaggctggagtgcagtggttacgatctgggctcattgcagcctcaacctcctgggctcaagtgatcctccttcctcagactcctgagtagctaggattacaggcgtgcaccaccacgcccggctaatttttgtatttggcagagacggggtttcactgtattgtccaggctggtctcgaactcctgacctcaagtgatctgcctgccttggcctcccaaagtgctgggattacaggtgtgagccatggcactcagcccgcattgtatactttacatggatgaattgtgtggtatgtgaattacaccgcaaaaccgtttaaaaaagaagaaagggtggagcctttctgaacctattctggttcagaggctgccagattcgcaaaatattttttaaaagaaagagagaaatggggtgggggagggaggaggagtgtgggggggaagaggtggagaaagaaaagaaagagaaaaaaaagaaagagagaaagcaagcggggaggaaaagagggagcgagggagtggggagagaaagcaggcgggtttgagaggtcagtactgagtcggcaggaggggatagctggagaccggggtcggggtgtgtgagtggggacagtgaacataagtgcatcttgtagcacctgattcattgtcactccagaaatgtcaccttctttcactgtttggggtttgtgcttattgggtcgtcactattgccagacttgctgcaagagagggtcagccctgagccagcagggggcagcagagcaccacacagatcatgcacaagcgctgcagctaccttgagcccccccatgcgcccaccccgtctctgcccctttctttacccctctgggaacccagagagtctatccagctctccaaccccaaacctggacacctccctccccactctcacggcaggcaccaggccctgccctccaggcctcttgaacttggccttccccagtacctgcagcccagccctgggccaggcagcttctctcccctccctgccccagcctcccgcctggactcctccccactcccattctcctaccacagagcagcccaagggatctttctaaagcccaaactcaacctagccccttcctgctcaaaaccatccatggctccccagtgccttagagtccaagctcctcaccactgcctccaacgcctgcaaagtccaggggacgctcagtctcatctctcagcacccaccgccctctcaccttcacccctggtctacagtcccccagatttaacttctttctgtttccccacacactgtgttccatctcacttccaggcccttgcacacccccaggcacacagctccactcttcctgcccaccccattcaccctccaagtctcaactcatacacctcctcctccaggaagccctccttgacctccaagctgggtcagatctctcctgtgagctcacctaccccagccccgcccagtctgggccatcactgcctggggatgggtctgtcccgctgaactatgagccctataagcacaattgctatctccatcactgaggggctcccagcactgaccagcacaaggcagaggcccaaggagtgtggatgctcattatacacatccttccctttcccaacctagcagtccccattcattcattgacaaacgtctgttgagcaactactatcaccaaactctgttacatgaacttgactggcatgagagaggtgaagataaaccagcccagctcctactctcagggagcttgaggtctagtaggggagatgacctggaactcaatgtaataataataattaataataaacattaccgagcacttattatacgccatgcactatgctaagggctttacatttattcactgatatcctcacaacggttctgtgag[135 bp omitted]accctgtctctactaaaaattagctgggcatggtggtgcatgcctgtaatcccagctacttgggaggctgacgcaagaaaatcgcttgaacccaggaggcggaggttgcggtgagctaagatcgcgccattgcactccagcctgggcaacaagagtgaaactctgtctcaaaaaaaaaagtaatggcaaattggctgggcgcaatggctcactcctgtaatctcagcactttgggagaccgaggcgggcaaatcacaaggtcaggagtttgagatcagcctggccaacatggtgaaacccatctctactaaaaatacaaaaaattagctgggtgtggtggcaggcgcctgtaatcctagctactcaggagcctgaggcagaagaatcgcttgaaccagggaggcagaggttgcagtgagccgatattgtgccactgccctccagcctgtgggacagagcaagactccgtctcaaaaaaaaaaaaaaaagtaatggcaaaagccacaattacttttgcaccaacctagtactgtgattatccccattttacagatgaggaaactgaggttaagtaagtgaagctgaccaggcaaagtggcttatgcttttaatcccaggactttaggaggcaaaggcagaaggaccgcttgagctcagaagtccaagatgagcctgggtaacagcgagacccagtctgcacacacaaaaaaatttatttatttactttcatttatttatttatttatttattttgagatggagcctctccctgtcacccaggctggagtgcggtggcacgatctcggctcactgcaacctttgcctcctgggttcaagcgatttctggcttatttttgtatttttagtagagacgggggttttaccacgttggccacgctggtcttgaactcctgacctcaagtgatccacccacctcggcctctcaaagtgctgggattactggcgtgaattaccgcactgggccaaaaatatttaaaaattagccaggcgtggtggtgtgtgcctgtggtcccagctacctgggagactggggtggaaggac[153 bp omitted]ttctaacaccgaaaatttgtcttctgctcatcccagcctgaaaggaaggtgaaccaagatgcaatccatgcccattcaagtggggtctgtgtgtccaggcagaggtgtctgccctctacaaagggcacaggggagagagtgatgcttaacccaaaggaggtctcgctgatggtggaatttcaggcaccgtgtttatgtttggcctaattagcttgagaccagtgtccttgacgggaactaagacgccccccacgcccatccccggctcccaggctctctccacccaagttctgcccaccagggcacactgcttccctctgccacctcctcttcccacgagccctggtacaccctagattctcagggctgtggctccttgctttacaaatgagtaagttggtggcagggaaggaagtgggctgggccatgaccaagagtcactatgattcacggggaaaaccctgccctcccgattcaactctgtgtgcaaaaaggttttgtgcgggttcctagggtctcagggtcaatggatgtagatagaccactagaggtatacacagccactgtccaccaactctcccaccccccgggtctgcctacagccctggatggggatcctgtaccgggggggcggttggggggttggacaggtgtgggttgaggtgttgtttacatgttgaacacactggggttccaggtaagtttccgtcagaagaaagcacttcactgctgaggcagaaatttcaaaatattgaaccacttttcgatcctggcagaagggaattttcccagggtgataaaagtgttctaaaattagatttgagtgatggctgcccaaaaggaattatgatattattcaagaaatcatggctttgctgaacaacagaaaactcgaacactgagcatttgaagatattaaggaattgttgatttttatgttcactgtttaggtgaaatgatagcattgtgagtgtgttatttttaaatgagtccttatcttttaaagatacaggcagaaatagctataaaatgatctgatggctgggatttgctttcaaataatacaggagagggccgtgggtgaggagagggaaccagattgcctatgagctgagtgatgggtatgtggttgcgagggcagacaccattcttctctctgctttcgatgggtgcgtagaatttcccataataaaaagtggtttttaaattgttttgaccattggcctcgcgcggtggctcacgcctataatcccagcactttgggaggcagaggcaggcagatcacttgagggcaggagttcgagaccagcctgggcaacctggtgaaaccccatctctattgaaaacacataaaaattacccgagtatagtggcatgcgcctgtaatcccagccactcgagaagctgaggcaggagaatcgcttgaacccgggaggcagaggttgcagtgagctgaggtcgtgccactgcactccagcctgggcaacagagcgagactccatctcaaaaaagaaaaaaaaaattgttttaaccattctaaaggaatgagaaaagaattctacaacttttgtttttttgtttttttttttgagacagagtctcactctgtcccccaggctggagtgcagtagcgtgatcacaacttactgcagcttccatctcctgggctcaagtgatcctcctgcctcagcctccagagtagctggaattacaggcatgtgccaccatacctggctaatttttttttttttttttttgagatgaagtttcactcttgttgcccaggctggagtgcaatggcgggatcttggctcactgcaacctctgcctcctgggttcaagcgattctcctgcctcagcctccccagtcgctgggattacaggcatgcgccaccatgcccagctaattttgtatttttagtagagacggggtttctccatgttggtcaggctggtctcgaactcccgacctcagatgatctgcccgcctcagcctcccaaagtgctgggattataggtgtgagccactgtgcccagcctttctttttattttatttttagtagagatgggactcactatgttgccctggctggtctgaaactcctgggctcaagcaatcctcacacctcagcctcccaaaatgctggggttacaggagtgaggcaccatgcccaacccaggcctaaccataattctaaatccaagtccaaccccttcccactttcctgaagggaaaaatgaggtgcagagagaggaaggaacccctaaccaggtccctttagggtcccaagagaaccctggcactctctgctggcctccatccccctaactctgcccttcacttcctcccctccagcaccttccagaaaagctctaggtggctagtccccctctgaccaccttctcccactttcccctgcccctcactcagctccagtcacaccaggctccctgctgtccttatgctcatcaaagcccctcctgccccagggccttgaattcacttgttgtaccttctaccaaaaacactctcctcccacacacccacaggctccctcctctgtcgcctccttcaggccagaaaaagcgccaccaccaccacctcccaaactaaaacagcaacccctgctcctctctatccacttgccctattttatttaattttatttattttgagacacaatctcacactgttgcccaggctggaatgcagtggtgcaatctcagttcactgcaatctccacctcttaggctcaagcaattctcccaccttagcctcccaagtagctggaattactggtgcacaccaccaccacgcctggctaattattgtacttttttgtagagataggatctcactg[135 bp omitted]taaatgccatatcaggttttttttattattattattgcccatctccctccaataggatttagcccaacaaaggaaaggatgtctctgtgcaaacagcctggtacatagtccatgcttgacaaatatttgttaaatgattgaatggcttggaaaaacccagatgaatgaggtgaggagggtggggacgggtatccaagcacagggaacagcctatggaaaggtctggagcttctccgatccacctgcctcctctcctgcatggaagcctaggtgctttttttttctgagacagagtctcactctgtcacccaggctggagtgcagtggtgtgatctcggctcacagcaacctctgacttccgggcttaagtgattctcctgcctcagcctcctaagtgtctgggattacaggtgcccaccaccacaccgggctaattttgtattttttttagtaga[139 bp omitted]gaattaaggggacatttggtcctttctccccaagaacaacctctccaggcccagccagagccaactccaggccttgacaggccggcacaggaagccacaccctgagcaaatatgacggccccctctgcctcgcccaagataaggggaggttgaaaggggtttggaaacctgcttcagcctaagacattagctccagccaaaccctcagtctcaaggcctccccacccctgcccagagaggacaggacaaggattctgccacggaggcccaagtctgacgtttacatctaatatatattgatgatgtcagtggtgggcagggtcttgaagagcagataaaggagttcccagcctccctcccgctcccaaggaaactaagtgactggtgagacaagagggctgggcgggcaaggggtgaccctgaccaaacaaggtcatagacccgtgtccccagatggctgtgcagagaagataagactcatctgctccaatcttatgaggcaatggcccggggcctcagtttacttgtctgcaaaatgggttttcttgggggtgggcagcggggagatggataacaggaaaagctgaagctgtcaaaaagaataatgggccaggcacggtggctcacacctgtaatcccagcactttgagaggccaaggcaggtggatcacttgaggttaggagtttgagaccagcctggccaacatgtcaaaaccctgtctgtactaaaaatattaaaattagccaggcatggtggcgcatgcttgtaatcccagctactcgggaggctgaggtgagagaatcgcttgaacttgggaggtggaggttgcagtgagccaagatcgcaccactgcactccagcctggatgacagatcaagactccatttaaaaaagaagaagaagaagaagaagaagaagaatgatatcagcagaatacatctacaagctgaccacttctcccatccctggttcagccgccactacctcctgcctggtccagcactacccaacaggagcaagagtggagccgcaaacacaattcaaccttttccagcctcatctcatgaagaaaggtgaaacgaatgtatttaacacaacatatgcaaaatgtcatttcagcacagaatcaatataaaaaactgattatctgttttacattattgtgtatgcatgcgctcttttttttttttttttttcttaatgagacaacaaggtcttgctctgtcgcccaggctggagtgcagtggtgagatcacagctcactgcagactcaacctcctgggctcaggcgatcctcctacctcagcctgccaaatagctgggactacaggcgtgcaacaccactcctggctcatttttaaatttttttgtagagacgtgctctacgctgcccaggctggtctcgaactcctgggctcaagccatcctcccgcctcagcctcccaaaatgctgggattacaggtgtgagccaccgcgcccggccccccttattgaacctctactccaatgtcgctctgacaatgtcgccttgctgccctgcataaaccagtgccccgaccacctccatcccttcccctgctttatttttctccacagcattgtccccacctgttctaacactgctcatgtttgtattcgtctattaactgtctccccaatcaataggtcagctctgtgtctaccgtattcacggctgtaaccccacagcgcctagcgcagtgcccggcacatagttggtgctccataaacatttgtcaaatggtggaggaacaacgaccactgtgcccccagtacgtgctctgaggcaggcccggcacggaacactccatgtgcctattttgatcctcagaagagtcccagggaagtcaatgtcatgaacaccccccacccactgcacaaacaggaaaaagcccctgcccacaagaaccccgtctgctttctgcgcagcccggcggcgcacagcaggtgctaaagagcctgcagctcttgactgaaccaaggatctgggctcacagccgggagcaccagaggaggggccagggaggtggaggatgggggcagactaggaagggtggatgtgacgatagagggcctctagagcccggcctggtcacactccgcaggcagacagcagatcaccaggaacctgagcctctctgaagactcctctctctgtgtcatccacacctggtgtccagttccacaaacatgctgtgagcctctgctctgtgccaggtgatttgctgggcagtgctggggacacagtggtgacagcccagccgtgcccagctgaggctcccaggccagtgggggaaaaagacccagccccagacagcgagaacccaaggcagtcagggctgagacagggaattccaggccctgaagtccaggagggcttcctggaggagagggtttggggaaggcagtggaatagagcagagggaagcagggatattctgggtagagtgcaagtgaaacagaagaactgaagcagagggttcccggaagcaagtggtattctatgtagctggtcaggtgggcaggagtcaggccgggcagggcctcctgggctacagtgaggaacctgggcttcctcccaagggcactggggagccacagcaggttctgagcacggaggggcagaggcaggtttttgttttggaaagagcctctgtctgccatgtggaggggcaatgggagtcggggagaccagggccagagactagggaggaggctggtggggagacaggaggacccaggcaaggtggggtggtggagtggtcacctagaccagggcaggggcttcagggagggagagaagatatacgtagagtcagttgccagaaggggtggcgtgttcggggagtagggggaggcatcagggatgaggccccaggtctcttttcccagcgatgaggtgggtagtggcgccttccctgataagggcaccaggggaagatacacttctgggggaagatgccaaggtcagtttgggacaaggtgagtgagaggtgcccagggacatcagggaggcatcctgattgatactgggatgaggtcccagtgctctgggccaggacgcagaagagtgaggtgaggtcacaggtggggagaggggagcaggaggcgccaggacatcctctgtgcctctcacctggcctcacccgcacctcctcagggccttctcccccttgttagagccctgccccacgagggcagcccaggacacagtgctggaggcaaaccaggacaggtgagcacaggtgtggccccctgcccggaagcaggctgcagaggcctcagaggaaccaggactcagaagccatcaggatgcaggtcataagaacacagctatcagcagctctggcaccacaaccccctcggctcctgcccagcatcatctcagagacaccttccctgttaccctccctccaccccaatttaaagtagcaaaccaggccaggggcagtggctcatggctgtaatcccagcactttgggaggccaaggtgggaagatcacttgaggccaagagtttgagaccaggcagagcaacatagcgagatcccatctctacaaaaaataaaatggcaaatcccctttctgactttatttttcaatctgacgtggaagatatttacctttcctttatttactccgcaaatgtcggccccctgagggcagggatttcatccgtcttgtgcacggctgcatcctcagcgcctagaacagcacctggcaaacaataggtgctcattcagtatttgtccaataagtgaatgagtgatttactgagcatttactctgcgccagtcgtggtaagtactgtacttcacatgtgtatctacttaatcctttcaacagccctgtgatgtgagtactattgttttccctattttacaaataaggaaactgaggcttggcagagtccataaattgcccagggtcctggaggtaggaaacagtggaactatgtccagagcctatacttttttttttttgagatggagtttcactcttttgcccagggttcaagcaattctcctgcttcagcctcccaagtagctgggattacaggtgcccgcgaccacacccagctaatttttgtatttttagtagagacagggtttcaccatgctggccaggctggtcttgaactcctgacctcagttgatccacccacctcggcctcccaaagtgctaggactacaggcatgagccactgcgtccggccatgagccaccacgcccggccagagcctatacttttaataacaggcataccaatcagacccacgtccaccaggctctggcttaaatccctgacttgtagcctctcactaactgctgtcaacaaacctgaagtagggtccatatcatctctatttttttgtttgtttttgaaatggagtcttgctctgtcacccaggctggagtgcagtggcaggatctcggctcactgcaacctctacctcctggattcaagcgattctcctacctcagcctccctagtagctgggattacaggcatgtgccaccatgaccggctaacttttattttttgtttttgcttttgttttttgagatagagtctcactctgtcacccaggctggagtgcagtggtgtgatctcagctcgctgcaacctccacctcctgggttcaagagattctcctgcctcagcctctcgagtagctgggactacaggtgcacaccaccacacccagctaattttttatatttttagtacatacgaggtttcaccatattggccaggctggtctcgaactcctgacctcgtgagccacctgccttggcctcccaaagtgttgggattacaggcgttagccaccacacccagctaacttatatttttaatagagacggggtttcgccatgttggtcaggctggttgcaaactcctcacctcaggtgatctgcccatctcagcctcccaaagtgctgggactacaggcacctgccaccacgcctggctatttttattattattatttttagtagagatggggtttcgccatgttggccaggctgatctcgaactcctgacctcaaatgatccgcctgccttggcctcccgaagtgctgggatgacaggcatgagccagtgcacccggccatcatctctatttatcagaataataaatggagactcaacaagggactgtccccagccccactttgggtaagtgcagagctggtgtcaaaactcagctctccttggccccaaagcctccgaatacgcccatttgacagagaggggaaaacaaggcctccgaagtgggagaaagagaatgtgaacttctgagcactttgcaggaagccaacaagaaggagagccccaaagaaagcatgtggccatacagtttcctgcccttctgtctgggtttgcacacagagcagggctcaaatcccctctccctgcaggaacccggacaagtgggagtccccacctagctcatctccatctgcaaaggggggtcctaaaggtgcccactttacagggttgttttgccatccgctgagacaacacctgtaggtcccctgcactgggtggggctgggaaaggtgcagtcaccttttactgattttcttccttggtgactcccaggctctctgaggaggccacgggcctgggtggttggtaagaactacccgaaaaccttcccctacttttcctctcttctcctcggtgacctggttcctctcccagtaccaaatccaggccctcggcacaaagagggttaggcggctgccccaggaggcctgcccaggtcacggcctctggccggtgcccgccacacccaccctggtacccaaaccgggccccagatccttggtgactcgatccctccaaattcaggtgatctcccctggctccaaatcaccaaaccctcccaggtcctgcggcagacggagccgagccccaaccaggaagggagtccgagcactgggacttcaacgccaccatctccaagactcggtttggggtgaaagatggcgctgactgggtacagctggctgctcctcagtggtgagcgagaatggcaccccccagcacctcagccccccgaggaccccagggaggggaggggacccccagtctgagagagggaaggtgtgagcagaagtccagcgtgctagggagggagggcagccctgcttcacaccggcagtttacccctccaagaggcatctgcattgggcaggctggggacagccacccagagaggttttcagggtgggctttggagatttctaagcccagggcacaagccaggacaagggagccgctgttgctccttcattcctgcaggtttctgttttatcagctatggaagccttgatgaggctaaactcttcccagcagctgtttctcccggaagatgtagcttagggcagttgcctttcccttctcagcctctgtgtacccacctgtgaatggggcctcactgacagggtcatgtaaaggtcattataagcagcaccacatatgccgtgtgcccggagctgttctgagagcttc[131 bp omitted]accccatctctactaaaatacaaaaaattagctaggtgtggtggcacatgcctgtagtcccagctgctcgggaggctgaggcaggagaatcacttgaatccaggaggtggaggtcacagtgtgccgagactgcaccactgcactccagcctgggcaacaaagcaagactccatctcaaaaaaaaaaaacaaccccaaaccacctatgagggaggcccacacatgaaccgcacttcatagggagaaaacgaggctcagaaaggtgaaaccattggccgctgtcacacggccagagagtggcaggactgagggctagacccagagaccctcactcctagccacactctaacagcctggaaagtaccagaaagctggccagccatgtcagtccttttgacgtgagcactgtcacagccgcccgttccgggcattcaaaccacacgtcattcaaacccaagcagccccgaccagctcatcgggcttggggctgatctgcttggttgagaaggaaaggggtggagtgtgttcatcttacccctgctttccgctgtaggcgagcttggagaggcagaggcagagccccagactgggagtcaggacccagggggcaggccctgacatcctacgtggggccatacaattagctgggctggatacgcagccggatctcgcgagacttagtttggtgactgtcacgatgggaaaaccctttgggtccggcttaaagccgcaggtcctgtgggccgagcacttgctttgcacttgctgtatgcaagatgtgatgctagatccttggcacagtccatcagacccaatcctcacaacacacgcctccctccctcggactgagtccctccctgggactgagctcctgcatctgactaacatgtattgggcacttactgtataccaggcattgtaagcatggtatgtatacagaatccttacaaccttaccaggcaggtagacctgtcatccccatgtgagagttggaagaacagaaacacagagaaagacagtgtactcgaagccatgcagataaactcccagaaagattaggtggctgagatgttgagagtcagagttgcaggttcaaatcctggttttgcctgtcctcatttacacagaggacactgggctggggacatgccccgagcctgagtctcttcttctgtcaaatggggcgattgatcaaacctgcctcatccaacccctctgactcctcttcctcagccacattcctgaatgtgggggccgagatctctatcaccctggagcctgcccagccgagcgaaggggacaacgtcacgctggtcgtccatgggctttcgggggaactgctcgcctacagctggtatgcggggcccacactcagcgtgtcatacctggtggccagctacatcgtgagcacaggcgatgagactcctggcccggcccacacggggcgggaggctgtgcgccccgatggcagcctggacatccagggcatcctgccccggcactcaggcacctacatcctgcagaccttcaacaggcagttgcagaccgaggtgggctacggacacgtgcaggtccatggtgagacaccccccaacacccgcctctgccccagctgggccttcccatctccttctcaatccttcttttttttaaaaaaaaaaaaaatccaacaaatcatcagggaaaccatcagggaataagtttctaaaataacctcaaaatgctcacctccttcaagatggcctccaggattagacctgcctcctaaaaccattctttgtccctccggctgagggtgtgggggcccagccacaatccggccatgccccttgttgggggaagggaaggccctcagagcaggtggtgtccggccccctccccctctgtctcttgcccccacagagatcctggcccagcccacagtcttggccaacagcacagcgctggtggaacgtcgagacaccctgcgccttatgtgcagcagccccagccccaccgccgaggtccgctggttcttcaacggtggggccctgcccgtcgctctccgcctgggcctgtcccctgacggccgggtgctggccaggcatggcatccgccgggaggaggccggcgcctatcagtgtgaggtgtggaacccggtcagtgtcagccgcagcgagcccatcaacctgaccgtgtactgtgagtcctcctggccccactggagatacccagtgtccaaacctcatggatggggaaactgaggccaggagagggggcctaagggcacacagcgagtcagcaggcaagctgggattggggaccagggacccctcttaaagtgcacttgccctcgccaggtgcagtggctcacgcctgtaatcccagcactctggggggcctaggcgggaggatcacctgaacccagaagtttgagaccagcctgggcaacatggcaagacctcatctctaccaaaaaacataaaaattagccaggcatggtggcacatgcctgtagtcccagccactcaggaggctgagatgggaggattccttgagccccggaggccgaggttgcaggtgcagtaagctatgattgcaccactgcactccagcctgggcgacagagcaagatgctgtctcaaaaaacaaacaaacaaaaaaaaacaacaacaacaaacaaaaaaaatacacttgccccatatcctaaaggacttctacagaccacctttactattgaataatccttcagttaggagcaatatctacagagaaaggaaacagggccagttggtttgaaaagggagcaggggagggaatagtgtaatgggaggggacacaaaatttaacaacataaccaaagcatgcagtcgttcccaggagcagcagatgtgcagtgtggaatcctgggaaaataaatcaccaaggtacatgaggacccatgatgtagaaaaacttagtgcctacaatcctagaatcttacaaccagagaattccagacttcagaagcactgaattccagactctgagaatcttagaacctctagacgcagagattcttagaatcttagaatctaaccctgaaatcttagtctagaatcttagaaacatagatttctagaagcttagaaccttagaacctagaagcaccaattcttgaagccctagaattctacactcttagaatggctttgtcagaaaaaaaaaatcatttaggctttttttatttgtcaatggagccatagatttcaaaaataccttgaaatattatcttgcccaacacattctttttacaggagagaaaggtgagatcctcttagagggagtgattctcaagatcctagaacaagttagagttaaggccagagctttttttcccctccactaggccaagatattcccagggacctagcttggtggagagaaaaccaggggtaccaacctccactcctccttccctctactgccccatctatctccctcctgcccccacagttggcccagagcgtgtggccatcctccaggattccaccacccgcacaggctgcaccatcaaagttgacttcaacacgtccctcaccctgtggtgcgtgtccaggtcctgcccagagcccgagtatgtgtggaccttcaacgggcaggccctaaagaacggccaagaccacctcaacatcagcagcatgacagccgcccaggaggggacgtacacatgtattgcgaagaacaccaagaccctgctatctggatctgcctcagtcgtggtcaagctctctggtgagtcacccccagcctgaccaccccccagtccccatggaggcctcatcaggctgcgaaggttaagccaccatttgcccaacagagaattggaacatggtagattcacagttcattcatgagctgtgacaaagtggcatatcaggcagatctgtttgcatctgggtctaaagagagacagcccgtgtcctgttcacctagagaacaaatggcaaaccattgtgggttgacagagtggaaaatcactcagatatcacttcaggtgggtgccactgctctaaattcagtcaccagctgtttagggccttgaccctctacccgcccccaccccaccacacagacagctgaaattctgtgcagccaactagactacccagttatctgacccagatgatgggtatacacacacacacacacacacacacacacacacacacacacacaactgaagaatcacagccaattgctggcaaatggagaaacagctggggaggcattgtcatcttgcttctgtcctaaaatgacctgagggctggggcagtgcaggcagctggcatttcagagccattgggatcctcaggcgacattttctcatcttccggagatggtggctttgaacattaaggcctcattaattctacctcggttccttcccaagtggccatcagcccccgggggacagtggggaatggtcgttccctccctcccactaacaggctgggtctcatccaaggggtggattttcacccaaagcagaaatggcatccccagaggtaagtgtgactcccgctccactcatctggggctttggcagctggtcttgacaggagacagggggatggaccagatgacctcaggcgccaccccaagccctgtctgtgcagtccaagaaggggggtgtccaaggtatgcaggtatgtgcagggagtggatacagtgcccccaagggcttctagcactgtcagcaactctgtggcaggtgctgggagagacacagaagaaaaggagacgccaccctccctccaccttgggagactaatctgatggaggagacaaggcctctgtccttggagagatgatcctgggacagggaaacatggctcctttattcaaggaatagctgctcaaagagaagaggcaatgcctcatccttcatgtcagtaatgagggagatatgacaacccaccctcagtgagctcctagtcagatggaggagacacagtctgcacttggggagaaatttccttctgatggggagacttggtctccaggagacatggccctgttttttgagcattcctagtctgatggggtatccacctttggggtactcctaatctgatggaggagtacaggaccccactttctaggaatttccagtctgatggaatagacatttccctctaacttccagggtccccaacttgattggaaaaactcagcaacaatttagaatttctcaatctgatggaggaaacagggctgccgccttgtaggaattttcaatctgatggaggagacatgctctcaccctcaagaatctttcaatctgatggaggagctatggcttacacattctggggtctctcggtctgacagacacaagtcccaaccatctcatggggaagacatggtccccattttctgggatttccactctgataggggagacatggcccctatattttgggaatttccaatctgatggaggagacatgacccaagcctctagggtcttccagtttgatgggagagacacctctcaaagtctgggaatttgtagtctgataggggaaacacagaccccagcagacactactgggacccagaatccacctccaccaccgcacaagtcacctccttcctcagtctccttcccagcaccctacatggggagtgccagccagctggggggaggccagcaagggttgggaaggggacaccatgccagatgcagaccaaactgacccagcccgctcgctctctccccagctgcagcagttgccacgatgatcgtgcccgtgcccaccaagccaacggagggccaggacgtaacactgaccgtgcagggctaccccaaggacctgctggtctacgcctggtaccgcgggcctgcctccgagcccaaccggctgctcagccagctgccgtcaggaacctggattgcaggccccgcgcacacaggccgggaggtgggcttccccaactgctcgctgttggtgcagaagctgaacctcacagacactggccgctacacactcaagactgtcacagtgcagggcaagactgagacactggaagtggagctgcaggtggcccgtgagtgtgtgggaaggggcaaggcgtgcccctttttagacaagggctcccaaaaggagcctttgcttcctccatcaggctggggggacatagaccaaagatggatacccatcccccatcaggctgaaggaagcagccttgtctcctccgcctaacttgggggtccccaaatagggttctgcctcttctatcaaactaatgacctacactgtgggtagacaggcctcctccatcagactgagggttgctaaaggggacccccatgccttctctctcaaataagaggtacagcacactgaaggttttaaaagagaaggcatagtctgatggtggagcatcctttttcctgcagacaggtggaccctaaaacatagggtccatattggggtaatgggttaattataggagtttacctctcctatcagactgcaggcagagaataaggatgaatcaggcctccctattcagactgggagatcctgtgcagtggggatcatgtctcctcctttctattattgtgagggcaaagtttctatcatcagatggtggagtttctctttcaaactgaaataaggatgattgctccattaggatggaggcctgtaggtgtggaagttgtgtctcctcacagaatggaagttcccagatgttggggaccatgtctccccatcagactgggagctcttagaagtcaggaacaatgtctcccccattggattgggaattcccaagtgttggagaccatgtcacctccctcagactgggagctctcagatgttgggaaccgtgtctccccatcaactgggagcttctagagtcagaaactatgcctcctccatcagactaggagctcccagagtcaagatccaggtctcctccatcagactgagagctcccagagttatagaccatgtttcctccgtcagactgggagctcccagaggcagagaccacgtctccttcatcagactgggagctcccagaggcatggtccatgtctcctccatcagactgggagctcccggagtcagggactatgtctccctcgtcagactgggaactccaggagtgagggtccatgtctcctccatcagactgggagctcccagagtcagggaccatgtttcctccatcagactgggagctcccagagtcagggaccatgtctcctccatcagactgggagctcccagagtcagggtctatgtctcctccatcagaccgggagctcccagagtcagggaccatgtctccttcatcagactgggagctcccagagtcagggaccatgtctccttcatcagactgggagctcccagagtcagggaccatgtctcctccatcagaccgggagctcccagagtcagggtctatgtctcctccatcagaccgggagctcccagaggcatggtccatgtctcctccatcagactgggagctcccagagtcagggtctatgtctcctccatcagactgggagctcccagagtcagggaccatgtctcctccatcagactgggagctcccagagtcagggaccatgtctcctccatcagactgggagctcccagagtcagggaccatgtctcctccatcagactgggagctcccagagtcagggagcatgtctcctccatcagactgggagctcccagagtcagggaccatgtctcctccatcagactgggagatcccagagtcagggtctatgtctcctccatcagactgggagctcccagagtcagggtccatgtatcctccatctgactgagcatccccagaggtctgagtccatgtccctacagcagggccaggtttcccccattagctctcagacactggggatgagatcattccccaagtctggaatcttgcctcccccagcagacagagcattctcagaagccatgtccctgagtccgggatggtgcctcccctatcactggaaatttccaggatcaaggactcaaccactgccagtcacccactttcatccagtcactgatcaaaccctggttttctgggtcagtgttaggggagaatgctgttcagtggcagcaggccaccccggcaaagccttgggattccttttcacccattctctcttctcacagtcaacctccctccctcgcacaaggaccaacgctaccttcctgaacctgaacctggcacaggctgagcgtggggtggattgggccactgggtggcccggggtgggcaggggagcagaaggggtgggggcactggggacctggtcctccatctctctgacatcctccttcgccccctcgccccatatgccccacagccctggggtaacagcgtgaccctggagacgtccagagagaagagctcttcgcaccatcctctggtcctcgccctctgagtgggaaccactcccccacagcgaggatgccaggctgtggtcctgctgttctcctgcctccaccctagagctagagccacagggccccactccctcgctgagctgttggggagccaccgaggccataaacgtcctggttaatgcacacgtgtgtcagcctctccttccaccaccgctagccccgccatttcctggtggccgcactcatttcctttcccccccaagacttttctcagtctgggtgtgcacgtgcaggaggatgggcccagatcaccgtgctccacaccccactgctggatgccagggccttgtgcccctcccgcagtgctccaggttatatgtgagagtcctgctccccagctggccaaggactgcccctcttggagcaccagcattctgtgggacatggctctcccctacactgcacctcattttgtcacctggaccccgaaacagggctgcttgtgctcaggaaatgaccatattttgcaagaagtcttccatcaccttctggtagtcctcacccatttaatcaaagacacaactttgtcctgggattccccgcatgtctctccaacattatctgcccaaccctgacaatatctccttccttctgcagccacaggaaaggccctgtggatggatgaatgcaagcggggcagaggtagaggccaggagtggagagctgggaagtgggggccagaatgagtgtgttttctaactcgtctcattagtgggagccacaggccccacccagccgcaatgccccactggaaacaggttcttggcattggtcaggagtggtgatggccgagtcgaggcttagaatagaaagacaggtttgggcagagacgagaaaggcccttttggggatgattgtgttgagttggggtgatgggtggtgaaagacctccagaatgagggttataaaacctggatcaaaatcctgcatttgccacggattcactagagcctcagtttgcccatcagtaaaaaggtgtggacttgaggtggaccagacttttccaaaccatttttaaaagcctcagagccctttcttcaaatacaagtttacatggcaggtcaatttattattaatatttaaaatagcaatgcaacaaatatagccccagcacagtgcccatgcctgtaatcctaacgctttaggaggctaaggtgagagaaacgcttgagcccagaaatttgagaccagcctgggcaacatggcaaaatcccgtctctatttttgaaaataaataaataaataaaaccaactatagataccaattcaatagctatactcgtctcccccaaaatttctatagaattggaaaaaaaattacttaaatttaaataccactgggattagccagacatggtggcgcatgcctatagatcacttgagcccaggaatttgaggctgcagtgagccatgattgcaccactgcactccagcctgagcaacagagtgagactacgtctcataaaaaatgttaaattttacaaataaaaggtaacacttggggccgggcgcggtggctcacccctgtaattccagcactttgggaggc[134 bp omitted]gaggcaggagaattgcttgaatctgggaggcagaggttgtaatgagccaagatcgcaccactgcactccagcctgggcaacagagcaagaagactccgtcaaaaaaaaaaaaaaaaaaaagtaacacttggactacagaagcaactaaaatacaagatatcaaccagaatcaaatgacagtaaaagcatcatatacatcaaacctgtgggacatggccacagccatccttgaagagaaaaatgatagcttataagcattgagagtactaaaggaaaaagacttgaaaatgaataaaacaagctttctactcaagaaactagaaaaagtccacaaaacgaaccaaagaaaaaagctaaggaatgaagaaaggtaaaagcagaaatagatgaaatgtaaaacaaaacatggccaataaaacctaaagctgattctttgaaaatgcaatgaaatagacagactttctgcaggtatgatcaagaaaaaaaaaaaaaacagagaagtataaataagaaacacaaataataaagagccaaggagattaatatataaaataaaaggccctggggtgggcgctgcgctcacacctgtaatcccagcactctgggaggctgagccaggaggatcacttgagcccaggagtcccagaccagcctgagcaatgtagcaagacctcatctctacaaaagtttttcaaaaattatccaggaatagtggtgcatgcctgtagtctcagctacatgggaggctaaggcaggaggattgcttgagcccaggaggccaaggttgcagtgagctataatcaccctactgcactccatcctgggcgacagagcaagaccttgtctctaaaaaaagagagagagagagaaaagagaaactggtctggttgaagcaaaggttgctcaataaatatacattgactgaagagggatctgttggttgctccccagcccactgccctccctgcttccatgacacacgcactgcctccctctctagaagctgaaaatgtcaggtactcactttcccaaactgccttgcagctgcaagcagccatgtgaccaattcaagcccatgaggaaggagagagcctaaagttccacccactgactccacctcaccggaggggacactgagggagctctatggagtttgaaagctattatctaaattagtggtctccattgtggggcttctagctgggacgtgaggatggacttgagcccatactactaaccccaacactatccagcccagaaagaagaaatagcatccatattaccaccttcaccccacccccatccacccaagttcacataaaaacttgacatagatgtggct[152 bp omitted]atagaaaaaattagccaggtgcagtggcaggcacctgtagtcccagctactggggaggctgaggcaggagtatggtgcaaacctgggaggcggagtttgcagtgagccgagatcatgccactgcactccagcctgggcgacacagcaagaccctgtctcaaaaaaagaaaaaaaaattagctgggcgtggtggcaggtgcctgtagtcccagctactcgggaggctgaggcaggagaatggcgtgaacctgggaggcagagcttgcagtgagccgagatcacgccactgcactccagcctgggtgacacagcgagactctgtctcgaaaaaaaaaaaaaaaaaa[131 bp omitted]tgaagccccatctctactaaaaatacacaaaaattagccgggcatggtgtgatcaagaaaaaaaaaacagaagtataaataaggaacacaaataataaaaagccaaggagattaatatataagataaaagggcacctgtaatccctgctacttgggaggctgaggcaggagaattgcttgaacccatggggcaggggttgcagtaagctgagatcataccattgcactccagcctgggtaacaagagtgaaactcagtctcaaaaaacaaaacaaaagaaattatcttcagtggctagtaagaaatattggaactagcataaacaattaggcagaatagatacacagggagtagcttatatggctagaagattatttttctcatttctcaaacgtaaaaaatctccagaagcagattgttcagagctagaatggaggccctgtagtgtcatcagggacacagctccttctattcttctgttccattatccttaccttggggtttccatcctctccatcacctcatggcccaagatggctgctggagtcacagctgcctcatccatgttccaggcaagaagcagaaagaagggaacaaagggaaacaaacaaaaaaaaactccccctagccagtttatggactgtgccccttttaagggaactttacctaaggcccatccaacaacccctgcttagatctgattggccagctcatagtaccatggccaccctagctgcaagggaggcagggaattgcagtcattgccttgggtatgctgctgccccaattaacatcaaggttcttgtattaagaaaggcagagagaatgggtcccgggtgggcagctggcaggcttggccactccaagctttggaacttctacctcctcagctaggcaaaatggccttcctcacctgagcccaaggagtaagagtcacagcccccatagcaggggtttgagaaagatgggagctgctgctctgagctgtgattgtgtgcagttgatgcagaatgaggccagcaggaggggcagaaggagggaaggagaagcagctcaggtttctaggtcaagcaaaatcccatagcctcagggtgtggtggaggctcaaatgtccccaagaccaggtcctccgtccctctgggcatctctgtgctcttttactgaattatctcaagtagtgcaatccccttcattaagagtgtaggaaagaataataacaataaccacaaaataataatcactcctatatctcgagcatcagtgtattagtccattctcacattgctataaagacatacctgagactgggtaatttataaagaaaagaggtttaatcagctcatgattctgtgggctatacaggcttctgcttctggggagacctcaggaaacttacaatcatggcagatggtgaaagggaagcaagcacgtcttcacatggccggcaggagaggaaggtggggtgctacacacttttaaacaagcagcactaggaggatggtgctaaaacattagaaactgcccccacgatccaatcacctcccacgaggtccctcctcctacactgaggatcataactggacatgagatttgggtggggactaagaactaaaccatatcaattggttttatcctttttcatgcaagatctcaattcctacagcagctcttaagagcagttactatcattcccccaacttacaggtgaggaaactaaggcacagagacttgaaaactttgctccaagtcccacagttcccatgtgtcctaggtggaggtgctggtgggggagtcctctccattcttcagcagggcagagggtttcagggcacagctctgaggacagacagaattctttttagctgtgggaacttgggtacattgcttgcttttcctcctcgtaaaatggagatgataatactgcccctgcctcctaggattgttgaaaagatcacattagttaatacaagtaatgagcctgaaacatggatgctcaataaatgcctatgacccagactaaggtgttagattttaacaacaggcagatagaaaaagcaaagataacatttttctttttcttttttttttttttttgagacggagttttgctcctgttgcccaggctggagtgcaatgcatgatctcggctcaccacaacctctgcttcctgggttcaagcgattctcctgcctcagcctccccagtagctgggattacagacatgagccaccacacccggttaatttttttttttttttagcatttttagtagagacggggtttctccattttggtcaggttggtctcaggtgatcctgacctcaggtgatccgcccgcctcagcctcccaaagtgctgggattacaggcatgagccaccgcgcccggccatttttttttttttttttttttttttccagaccgggtctcagcattatccagactggaatacagtgatgcaatcatggctcactgcagtctcccaagcagctgggactacaggcatgagccaccacgccggccaattgttgcattttttgtggagtcagggtcttgttctgttgtccaggctggtctcaaactcctgggctcaagcaatcctttcacttcagcctcctaaagtgctgggattacaggtgtgagccaccacaccctgcttcaaagataacatttgtcctggcgaacttaatcctactaagcaggtttgcttcgctttatgtaatatatgatgttctttacattgtaatcactgagatttgctgacaaaaagtaataataggccgggcgcggtgcctcatgcctgtaatcccagcactttgggaggctg[132 bp omitted]ctgaggcatgagaatcacttgaacccaggaggcagaggtttctgtgagcggagattgcaccactgcactccggcctgggcaacaaagtggactccatctcaaaaaaaaaaaaaagtaataggcagatcacaagatcaagagattaaaacaatcctggccaacatggtgaaaccctgtctctactaaaaaatacaaaaattagttggccgtggtggcacatacctgtagtcccagctacttgggaggctgaggcagaagaattcgctcgaacccaggaggcggagtttgcagtgagcctagatcgtgccactgcactccagcctggagacagagtgagactctgtctcaaaaaaaaaaaaaagtaataaaagcaataataataaatgtgtatgagcttttagaaacacgatgctcatcatcgcaggttccagggtaggtgctctcagcacaggttctctgacttgctcctcaaagcttccctttgaaatggaactattaatacatttcccaaatctcctgtttattaacgtaaacatccctgcgaagagcactggctaacgcctgttatcccatcactttgggaagctgaggcaggaggattacttgaggccaggagttcaagaacagcctgggcaacattgcaagaccctatctctacaaaaaaaaacaaaaaacaaaaaaaaaaaacagaattatttgggcatggcagtacttgtctgtcatcccagctacctgggaggctgagatgggagcattgcttgcgcctaggattttgaggctgtagtgagctgtgatggtgccattgcactccagcctatgagacagaacaagaccctgtctcaaaaattaaaataaaataaaataagttatatatcccaggcttctgcctgggcccagaaaacctgtctctccagggtggggacttgaaagaattttctttcttttttttttcttttttttttttttttgagacagagtcttgctctgtcatccaggctggagtgcagtggcatgatctcagctcacttcaacttctgcctcccgggttcaagctattcttgtgcctcagcctcccgagtagctgagattataggcgcctgccaccacgcccggaaagcagaatttttaacaaagggtctagggaatttttgttagctgggaaattgggggactcagatgcagagactgtttgacaaaaaaaaaaaaaaaaggaaagtgagacaccacaaagaagaggaggtgacttgcccaaagttactcagccagaaaggagcagggccaggatttggtccagagaggagcaggaactagtccagggtcacggagcaggtttcagatgagggctgagactggcgcccttcactgtcccgagcaggtccgcagtggctcctcgcctcccccattaagccacgaagctctggtggcgccgggggccctcaggttccaccagccgtgggtggggaggcagactatacccctctcagccccaatcccttccccctcacccaagctgccttttctcaaataaccacactggggagggcagggagtcggggtgaccttgaggccagaatacacaatggcccagtccctctctggagccctgccagggagaggaaggaagcctgccctgtttttttccatggactggaatgttgattcaggatggagagcagggaggagggaagggggaggtgggagagagagaaaaaaaaaaaaggaggaaagagaagggagtaggaggagggtggaggagggagaaaaggggaacagggcaaaaagggagaagaaggaggtggaggaggtggaggaggaggagggatggggaggaagaggagaagaaagaggaaggagacagaagaggagcatggaggagggggtgccaaggccagactttgggaaccaaggaatgagccccatcagcttcagcccatcctgacacacagtgtggagaatgcagagtccagagagggcaccccaaatctgcaaggttgcacaggaccagtgcagccaaagggcctcacctgtgcggctgcctcctgcctgtggaggcaggagctccctgagtcctcacagagaccttcagacgcaggtgtcatgttgcatgtttctcagaagaggatactgaggcgcccagaggtaaagccacatttcctggagcatctccccttcggatcggactccagggtccttacaatggtctgcaggcctgcccgcccgtcattcccttcatcatctcctctccttcactcactgcagccacctggcctcctggctattgtttgaacaaatcaagcaactccttcctcggggcctttgcactggctgttcccgctgccaggaatttccttccctcagacacctgcatcactccagtcaggtctctgctcagatgtcacctcctcagaggggtcccctgtacacccaaagttgtctggctttattcttcacagcatttatcacttacacaactaacccaactttacattttatatttcttttttgttttcttttttgagacagtcttgctctgttgcccaggctggagtgcaaccgcacaatcacagctcactgtggcctcgaactcctgggctcaagcaatcctcctgcctcactctcctaagtagctgggactacaagtgctcaccaccatgacctgctaattttatatatatatatatatatatatatatatatatatatatatatatatacacacacacacacacacacatatatatacacatacatatatatatacacacaaacatacatatatatacatacatatatatatatgtgtatatatatatatatatatatatatatatttttttttttttttttttttttccctgagatggagtcttgccctctcgtccaggctactagagtgcagtagtgcaatcttggctcactgcaacctccacctcccatgtccaagtgattctccagcctcagcatcccgagtagctgggattacagtacctgccaccaggcccaactaatgtttgtatttgtgtagagatggggtttcaccatgttggccaggctggtcttgaactctatctagaatatacaatatatcaaacatttcaacacaaaaaaaaaaatctgactttttttttttggagatgtaatctcaatctgtcacccaggctagagtgcagtggcatgatctcagctcactccaacctctgcctcccaggttcaagtgattctcctgcctcagcctcctgagtagttggaactacaggcttgtaccaccacgcccagctaatttttgtatttttagtagagtcggggtttcaccgtgttggccaggctggtttcaaattcctgacctcaagtgatcgacccgcatcggcctcccgaagtgctgggattataggtgtgagccatcacgactggccattttttgtctttttgatgacatcttgctctgtcatccaggctgagtgcagtggcgcaactatagctcactgcagcctccaattcctgggttcaagcaatcctcccacatcagcctcccaagtgagtagctgggaccaccactgtgcaccaccacacctggctgtttttaactttttgtgcagacagggtctcgctgtattgctcaggctggtctcgaactcctggcttcaagcaaccctcctacctctgcttcctaaagtgccaggattataggtgtaagccaccatggctggccaacaatataattttttaaacaggcaaattatcttaacagacatttctcaaaagaagacatacaatggccaacaagtatatgaaaaaatactcaacatcatactcattggggaaatgcaaatcaaaacaacaatgaggtattatttcacctgagttaggatggctgtcatcaaaaagacaaaaaatggccagttgtgatggctcacgcctgtaatcttagcacttcgggaggccgatgtgggcggatcacttgaggtcaggaattcgaaaccagcctggccaacatggtgaaacttcaactctatttttgtaaaaatacaaaaattagccaggcattgtggtgcaagcctgtaatcccagctactcaggagcctgaggcaggagaatcacttgaacccaggaggcagaggttgtggtgagctgagatggcgccattgcgctccagcctgagcaacagagagaggttccctctcaaaaaaaaaaaaaaagaaagaaaaaaaaaaaggagcagggattcagcttttgagggccatggcgaggattttggccatcaccccaagtgaagtaggagccacagaggctggatgggttctgattcagtttcttttttttttttagatggagacttgctctgtcgcccaggctgcagtgcagtggcgcaatctcggctcactacaacccccgcctcctgggttcaagtgattctcctgcctcagccttcccagtagctgggattataggcatgtgccaactcacccagctaattttgttgttgttttgttttgttttgttttttgagacagagtttcactcttgtctcccaggctgaagtgcaatggtgcccactcagctcactgtaacctctgcctccggggttcaagtgattctcctacctcagcctcctgagtagctgggattacaggcatgcactaccacgccaagctaatttttgtatttttagtagagacggggttttgccatgttggccaggctggtcttgaactcctgacctcaggtgatccacctgcctcagcctcccaaagtgctaggattgcaggtgtgagccatcatgcccggccctgattcaggttctaacaggatccctctggccatgaggtggaaagagactgttgggggcagaattgtaaagcgagggacaagaagagtcaggggtctccaagctttgagcctgagccactgcaaggatgaagctgccatttctgaggccagaaggctgcaggcagggctgggttggagattggaatgaagataggtcttgtttgaggccaatgaggagggagcctcacccgaggcacacaggctccaggcgggaagttggcgacaagttgtggactgtggttttcacccacctcatggggccccctcatcctctcccccaacttcccctcacgccgtggtggagccagctttgtttgtttcccccccatcatccgtttcatgatggggaagactggttttcccctaacccaacagacacctcttccctcagcctgtccctgaccctcccacctcgggaagccccgagcgggcctcccagaatgtcccggcaggaaggggctgctgctaccgttcatccagccagatgaaccccaaaaggggaagtgggtcacccgtagtcacccggctcatggtcagctcgggacttcaggatctcgtctcttcactgcacccaccacagccctgggaggttttccatgcacgcttctcattctccccacatttcacacgagaaaacaggggctccaagagaggcccacactcacctaaggagctccaaagataggggcatctggatttgaacccaggtcctagcagatgttgttagctcagaggagaaggcagagagggtgaacagaacccagcctgccctcccagatccagtgggaaggcagacttgtccccaggtaataatagcccagcagtgttcacagcctgggatggaggagcccaggaggctgcaggagctcagagcgcatgcctgacccagcctggggtcaaggagggcttcctggaggaagggacagctcatctgatacctagaggatgagtgggagttactaggtgtaaatagtgcagggagagggaagagtatgtgcaaaagcctagggttgagaggaaacctaggggctccagcaaggcgcagtggctcatgcctgtattcccagcactctgggaggccgaggcgggcggatcatctgaggtcaggagttcaagaccagcctggccaacatggtgaaaccctgtctctattaaaatacaaaaattagccaggcgtggtggcgtgcacccataatcctagctacctggcaggctgaggcacgagaattgcctgaacttgggaggtagagattgcagtgagccaagatcacgccactgcactggcgacgaagtcagattccatccctctctctcaaaaaaaaaaaaagctggggggagcctaggggcttctaaatccgatcgtgtcctggccctgattaaactctcctacagctgccctggcaaactctttagcttggcattcattcattcattcattcattcactcattcattccataaacattccctggagtgcattgtcagtgtcaggccccaggggaacacagcagtgaccacgacagccccaccagaccatgaccctgaccagggggctcacgagggcggagacatctactccaagacctgaaggaggagtaggagagatgctggggaagaggcagggaagggtgttcctggcagagggaacagcctgtgcgaaggcctgaaggtaagttttgcatatgacacctttgagaaactacttattgttcaactgaagcatagggttgttcagaagaagccagccttgtggccgggtgtggacttcctcccagggcaccagggagccactgcagagttgtgagcaagggacagacagaggtaggcttgtacttccaagagactcccccagctgccacatgcagggtgaatggaatgatgcacagaatccagtttcaggggtagtttggtacttggacccaggtcccagggagagagtccaaggagcccttctctggtcttccaaggagctgctctccccaagctccggatggaaggcgtgcccatggcaaccgctaggtggtgcccgtacaccaccagccaggtctttttttgccaaaagtagatcaggcccagagctgggcagaactgcccctgggtcaggagagcaaatcgtctctgtcttttggtcctggctccctggccaggcatcctggggccatttgactcccaggctcaggaaggagctggctgagctgcagtgagtatgttcttcgtctctttcctcaccttggaatctcagacgggagcaccctggctcccacttcagacaggaagattcttacctccctcatcagactagcaggctctttgtctccccaccagtttgaggggctccccatttctatcattcatttggaagctcatcagctctcccagaaggcatgggagcccttcaacacccccatcagactaggactacccatctcccccatcaaattagaactgcattgtctcacacatcaaagtatcactcctggccaggtgcagtggctcccgcctgtaatccaagcactttgggaggccgaggcaggaggatcacctgaggtcagaaattcaagacaaacctggccaacacggtgaaacccggtctctactaaaaataacaaattagccaggcgtggtggtgtgcgtctgtaatcccagctactcaggaggctgaggcag[138 bp omitted]ctcccctggcagactggaaatatagactggacactcgttcttgctgcacaggactggagcttcttatcttcttcattggatttggacagtcctgtctccctcatgggatttggtgagagctccttagtttccttatttttcccactgtgttgggccaccttgtccccaccatcagattggggaacaccttgtctcccagtcagaccagaggggcggactcctctgcccttgcaaaggttcctaggtccttcttacatccataggaggaaccatgcctattttaccaagagggaaactgaggcacagagaaacaaagcaccacttctctgtccagctgcagatgcctccacctccccctccgcccgctcctctgcccctgccctcccccgcccccgcccctgacctgggtaactcccctggcaccgggagtaggggaattttgccctgctggcctctgcaccaaccacctccccttatcggcagcgtcgccaccagtggcggcccagggttaaagtccggagagagctccgggcgcgaagcggatagggagggaggagtggcgcccaacccagaacggggactccccggaggtcgagccctcacgctgctgggaggagaggggatgggcagggccgtgtcccatggtaaggtgtgggttcaatccttcctttctagttcccggctgtgtggtcttgaacctggaacttcaccccaactgggagcctcagcttctccagctttaaggagtcaggggcgtgaaaatgtccaagctctggagtcagactccaggagtttgaatgctggctcctataacctgctgtgtgagatctggggccagcgagtgtgtctctctcagcctcagtttccccagctgtgcaatgaggatacctagtgggtggtggtgaacgctccatgagtttacgcacaagaaaaccttgggacagtggctgatagtggcgccagcaagccagcatgcaccccaccctttccttccaagaaaattgcctcctaaatctatgattggtaaccttcacccctccctctttgacccacctcctaacccaggccacctggtgtcttgctgcacagctggtctccctgcccgcaccacacccagaggcgtccttggaaacccaaccctgacccctggtcagaatctgccatggctccccagtgcccccaggagaaagccaagtgctgtgccacagccacagcctgaccactcactgcttgtatttttttttctttttctttcttttcttttctttttctttttttttttttttttttaagacagggtcttgctctggccccaggctggaatgcagtggtgccatcatagctcactgcagcctcaacctcctgggctcaagcaatcctcccacctcagtctcctgagtagctgagactacaggcacatgccaccacacctgggtaaatttttaaattttttttttagcgatagggtctcactcattgcccaggctggtcttaaactcctgggctcaagcgatcctcccgcctcagcctcccaaaatgcttggactacaggtatgcaccaccgcgcccagcctcctttctggttttctaataaagccttttgttcacctccttcaaacacttccccatgctcttcaggtctcagctcaaacaggccaggcccggtcccctgggtcctctctgtcctccgtctcctggttccctgtacctctccaaaagcccccacgaccaaaagaagtaaagatgtagggccgggcgcggtggcctacacctgtatttcccagcactctgggaggctgaggtaagtggatcacctgaggtcacgagaaccgattgaaccccagaggcagaggttgcagtgagccgagattgcgccactgtactccagcctgggcgacacagagagactcaacctcaaaaaaaaaaaaaaaaaatggtggctgggcaaggtggcttatgcctgtaatcccagcactctgagaggccaaggcaggcagatcacttgagcccaggagttcgagaccagcctgggcaacatggtgaaaacccgtctctacaaaaaatacaaaacttagctgggtgtggtggcatgcgcctgtaatcccagctactcaggaggctgaggcatgagaatcgcttgaatccgggaggtggaggctgcagtgagccaagatcatgcgactgcactccagcctgggtgacagtgcaagactctgtctcaaaaaaaaaaaaaagttcccactctggtccagccaccatcactgaaggcccggaccatgcagtcacctcctcatgggactccctgcctgggtccttgctgcacctccacaaggacctgtctttcccccacatgcagccacagggatcctgttaacacctaagtcatcagaaggctgaggcgggaggatcgcttgagcccaggaggtcgaggctatagtaagccaagatggcaccactgtactccagcctgggcaacacagtgagaccctgtctctaaacagtaataataataacaaattaaattaaattaaaacctggcctgggcatggtggctcatgcctgtaattccagcactttgggaggccgaggcagatagagtacctgaggtcaggagttggccaacatggtacctgaccaacgtggtgaaaccctgtctctattttaaaaatataaaaattagctgggcctggtggcacatgcctgtaattccagctactcaggaggctgaggcaggagaatcgcttgaacctgggaggcggaggttgcagtgagcccagatggcatcactacactccagcctgggcgacagagcgagactccatctcgaaaaaaaataaaaaatgaagtcagattatccctcccctgcccagaaccctccatggctcccatctccctctgagtaaaagcctatgtccctacagtggctcataagatcctgagccatctccttgccacccttcccctctccccatcctcccactctcccccagctcatcctgctccagctacactggcctccaacagctgttccgacccacctctgggccttggcacttgctgttccctctgcctagaatactcttcccccagatgtccacatggttcattccctcccctcactcaagtcttagccccaaacgtcattccttggagggcctcccttggccaccagatttaaacaacagcttccacttcctatgctccatctccctcattccctcaccagttttatttttctccatagcaaatacataccattggctgtattttccttgtcttgttgactgtctcctggatggatggacgagtctgtggctccccaagggcaggaatcttagttgttcaacaccagggcagggcctggaaaacctgttagcagagtgaatgaattgtgtgtgtgttttgaaaaggtaaggtgttcacaagttccaaaattcaaaaaggaccaaatggcagtgagctgtcacttccccaccacgactctgcccctccctccccagtcctgttctcacctcccagtttccgtttttttgttttgttttgttttgagacagggtctcactctgtcacccaggctggagtacagtggtgccagcatagctcactgctgcttccacatcctggactcaaatgatcctcccacctcagccgccctagtagctggggccataagcacgcaccaccatgcccagctaatttttgtatttttggtagagacggggttttaccacgttgcccaggctgatctcgaactcctgggctcaagtgatccatccaccttgcccttgcaaagtgctgggattacaggcgggggccgctttgcaaatggtgcacagtcttgctgtggcctgcattttcccctagcaatacagcaatacatctggaaaatcacaccgcatcagcaccttcttttttttttttttttttttaataattgcatgcacagtgtcgacttgtggacagacgagagctcttgccgcaattgttattatatttcaggagtggtgtggcgtggtgcctaagacctcagtgtcatctctcagacccggattcacctcgtagctctacagccagaactcccacaggctgctggtgggcgtgcaagccccgagcagccactttggaaaatggtttgccaacttcccgcaaggttaaatacacacttcccataggatccaacaattttattcctcggtattgacccgagagaaatgaaaacctattttcacacaaaaaaactgtatgcacacacactcacagcagctctgttcataattgccaacaactgtaaacaacccaaatgtccttcagcttgtatgtggataagcgagctgtggtccatccacacaatggaatatcactcagcagtgaagactaactgctattgatacacacaacgtggatggacctcaactgtgttat[137 bp omitted]atggtgagaccccatctctataaaaatattgatgatgatggtgatgatgatgatgatgataatgataataactacattactccatttacaagacactctgaaaaaggcaaaactagagggacagaaaacagacctgtggttgccaggggtggggtgggggatgggcgtgaccccaaaagggcagatgaagggttttaggggtggtgggacatatccatattttgattctggtggtgactacacagccacatgagcctgtcaaagctttaagaactgcatgccccacaggcacttcgagaggccaaagcaagaggccaggagttgaagaccagcctgggcaacatagtgagaccccatctctaccataaatacaaaaattagctgggcttggtggcgtgcacttgtagttccagctaatgaggaagctgaggcgggacgatcgctagagcctgaaaggttgaggctgcagtgagtggtgatcgcaccgctgcactccagcctgggtgacagagtgagaacattcctcaaaaaaaaaaagaaagaaagaaagaaagaaaagaaatgtatgatgaaaagagtgaattttactgtaggtaaatttgtcaatgatttttttttaaggactacatactctgtaatcccatttacatgtcatcctggaaaagcaaatttatagggataaaaagcagctgggtgtggcggctcacacctgtaatcccagtactttgggaggctgaggcaggtggatcacttgaggtcaggagtttgagaccagcctgggcaacatggtgaaaccccacctctactaaaaatacaaaaattagccgggcgtggtggcaggcacctgtaataccagctactcaggaggccaaggcaggagaatcgctggaacccgggaggtggaggttgcagtaagccgagatcgtgccactgcactccagcctgggtgacagagcaagaccccatctcaaaaaaaaaaaaaaaaggcagatatagctgagtgtggtggctcatgcctgtaatcccagaactttgggaggctgaggtgggtggatcacttgaggtcaggaattcaagaccagcctggccaacatggtgaaacctcgtctctactaaaaatacaaaaattagccggacatggtggtgcctgcctgtaatcccagctactggggaggctgaggcagaagaatcacttgaacccgggaggcagaggctgcagcaagcagagatcgcgcccctgcactccagcctgggtgacagagcaaaatgtctcaaa[148 bp omitted]cccgtctctactaaaaattcaaaaattagccaggcatggtggcgggcgcctgtagtcccagctactagggaggctgaggcaggagaatcacttgaaccagggaggcagaggttgcagtgagccgagaccgtgccactgcactccagcctggcaatagagtgagactccatctcaaaaaaaaaaaaagaaaagaaaaagcagattagtggctgccagtgtctggggacaaggggaggagatgactgcaaggagggcacagtggaccttttccgggcactagaaatgttctatatcttgatcaggatatgattaaatgattgtacatgtttatcagaactcatctagcatactccttctttaatttaattttaattaatttaattgatttatttttgagagagtctcgctctgtcacccaggcaggagttcggtggcaagatcacagctcactgcaatctccacctcctggattcaagtgcctcagcctcccaagtagctgggattataggcatgcgccaccatgccccgccaaacacacacatttgaaacaggtgtattttattgcatgtaaattatacctcagtacagttgatttttaaaatctaaactcctggccaggtgcagtggttcaggactgtaatcccagcactttgggaggctgaggcaggaggatcactggagcccgggagttcaagaccagtctgggcttcctggcaagaccctgtctctacaaaaaaaaaaaaaaaaaaatgcaaaaactagcagggcatggtggcacatgcttgtagtcccagctactcaggaggctgagggggaaggatcacctgagccccgggaggtggaggctgcagtgagtcgtgaatgcaccactgcactccagcctgggtgacagagtgagaccccgtctcaaaacacacacacacacacacacacacacacacatttagctcctcttcccccttattggctgtgtgaccttagacaaagctcctaacttctctgtgcctgggtaaatgatgagggagttgggaaggagggaatgatcactgagggcaggtgctgaggtctcaggtctcactgtggattcatgcaagaaacgtttacaagtgaaacagaggggctttatgagcttttagaggggaactggagacagagacctgagcagctgacaatggctcctatgtctccggagggcaggtggtgggctgagcactgtcagggcctcacctgcatccctttgaaccatcgggcactcctttgctgacctggaaaagtgagtggagccatccctgggatcccagagaaatggcatcgagggcacacaattaagagcattgtaagcaagccttgtgaacagtcagatgggcttgacagccccgtgcccagaggtctctgctgtttggggcagtgctggatacacacagcagtgacagccccaggcctgccctcacaggctcacacatggggaagactagcctgtccccagacagtcgcatcccagaatgttggggctggcatggtcaggggggcccagagggggctcctgactcagactagaaagagaaatcagggagggcttcctggaggaaaggctgtcagagctggggcctgatgtgtttattgagcacttactgtgtgacctggtttggatctccaagaaagaggtatagttttgacgttgaagtgaaaggggtatgtatggaaggaggatggtgcgagagaggccttggctaagaggcagaaaggggtgtgggtgggacagagccgggggataaggctgaaggaagacggtagctggtgtgggtcctctgcggcaggatcctggactttctcccgatgatggggctcaggaaggagcagcttcctcaggttccatcctgtgcaaagggaggaccaggcaggaggaggtggggaggctgaggaaaggccatggaaatgagaagtggctataagagccacccaggggaggggacacagggagggtgagaagacctgggcgcccgctcctttctcttctctgttctcactctgagctagacggcattggccgggcagcttccttgtttctaaaagtttaagataaagggcaggcaaggtggtgcctgcctgtagtcccagtgctttgggaggcccaggcaggtggatcacttgagcctcctgtttggagctgtagtgagctatgatcacatcactgcactccagcctgggtgacagagcaagaccccatatctaaaaataataataataattaataataaatataaatttaagatagtgaatctggccgtgcgtagtgactcatgcctgtaatcccagcactttgggaggctaaggtggacggatcacctgaggtcaggagttcaagaacagcctggccaacaggacgaaaccctgtctctattaaaaaacacaaaaaaattagctagcgtgcacctgtagtcccagctactcgggaggctgaggcatgagaatcgcttgcacctgggggacagaggttggcataagccaagaccgcaccactacactccagcctgggtgacagagtgagactccatctcaataaaaataaataaataaataaataaataaataaataaatagtgaatcttaagtttgccaaggatgcatttttatctctctttagttcttaagactctgatcattcttctttttttttcaagttccagggtatatgtgcaggatgtgcaggtttgttacatagtaaaaatgtgccacggtggtttgctgcacccatcaacccatcgcctaggtatgaagcccgtcatgcattagctattcttcctaatgctctccctccctctgcacccctccccatcccaacaggcctcagtttgtgttgttccccttcctgtgtccatgtgttctcatcattcagctcccacttataagtgagaacacgtggtgtttggttttctgttcctgcgttagtttgctgaggataaatggcttccagctccatctgtatccctgcaaagcacatgatcttattccttttcatggctgcatagtattccacggtgtatacataccacatttttctttatccaagacttcgatcattcttaatttttatttttattttatttatttatttatttatttttgagacagagttttgctcttgttgccaaggctggagtgcaatggtgcaatctcagcccaatgcaacttcctcctcctgggttcaagtgattctcctgcctcagcctcccgagtagctgggatgacagccatgcaccaccatgccgagctaattttgtatttttagtagagatggaatttctccatgttggtcaggctggtcttgaactcctgacctcaggtgatccgcccaccttggcctcccaaagtgctgggattataggtgtgagccaccgtgcctggcctaatttcttaaattctacccatttttgctcctaaagttctgtaactgcaggtttacttgatcctttgatactaagattcattcattcagtaaatacttactgggcctctattctgccctaggtcctaatgatacaagggagaacaaaatgtataaaatttttgccatgacagaaatcacatttactgagcactcactgtgtgccaagtttcatgccaggtgtacacatataacattacctacatgatgagttacagacttctattatccccattatccaaatggggaaactgaggcatagggttctggaatcccttgttcctaaaaatctaggattctagaattcctctccttctccttcctcttcctcttcctccctcctcctcctcctcttctccttctccttccccttccccttccccttccccttccccttccccttctccttctccttcttctttttgagacagggtctcactgtgttgcccaggctggagtgcagcggcatgatcatagctcactacagcctcaatctcccaagctcaagaaattctcccacctcggtctcttaagtagctgggaccacaggcagggtctcactttgttgtccaggctggtcccaaattcctgggctcaagtgatcctcctgtttcagcctcccaaagtgctaggattacaggcatgagccaccgtgcccagcctagaattctttgcacctaagattgtaagggtctataattctttgtccttaagattctcttatgcttggattcaagtgaacaatgtatataggaaaaggtgctgaatctcattattgatccaggaaatgcaaattagaaccaccctgagattccaatccacacatacacacagcaggatgactcatatttttaaatctggtagatccagtactgataaagatgtggggcaaggagaactcacagcggacattgaagatgggagtgagaattggcataaccacgtgggaaaagtgtctggccatgtcttctacaggggacaccctgcagcctaacaattctagtcctggagaatgcagaaaaatgcacgctcatgagcatgagcagtattggccaaaacagtcagaaagtggaaaccaaccttctgcccaccaacaaataatagattcaaaaattgtgctatacagccgagcgcagtggctcaagcctgtaatcccaaaactttgggaggttgaggcaggtggatcacttgaggtcaggagttcaggaccagcctggccaacatggtgaaaccccatctctactaaaaatacaaaaattagctgggcgtggtggcacatgcctgtaatcccagctactctggaggctgaggcaagagactcgcttgaacccagaaggcagagattgcagtgagccaggatcatgccactgcactctagcctaggtgacagagcaagactcagtctcaaaaaaaataaaataaaataaattgtgctatatccatgcaagagaatagtatacagcaatgaaaaaataaacacactccaatagattcaaggatatgaatgaaaagccaggcaaggtggctcacacctgtaatcccagcactttgggaggctaaggggtatggatcacctgaggacaggagtttgagaccagcctggccaacatggtgaaaccccatctctactaaaaatacaaaattagccaggtgtggtggtgcacacttgtaaccgtactcaggaggctgaggcaggaaaatcacttgaactcagaaggcagaggttgcagtgagccaagattgcgccgttgcattccagcccgggcaaaaagatcgaaactttaaactttagctcaaaaaaaaaaaaaaaaagaaaaaacagaaaagaatatgaatgaaattcacagacataaaattgagtcaaagaagccagatccaagaggttgtacaataagattccctttaggacaggcatggtggctcacgcccgtaatcccaacactttgagaggctgagccaggcggatcacctgaggtcaggagttcgagaccagcctgaccaacatggtgaaaccccgtctctgctaaaaatacaaaattagccgggcgtggtggcgcatgcctgtagtcccagctactcaggaggttgaggcaggaaaatcgcttgaacccaggaggcggaggttgcagtgagccgagatcgcaccattgcaccccagcctgggcgacaataggaaaactctgtctcaaaaaaaaaaaaattagctaagcatggtagcaatgcacctggggtcccagctagtcgggaggctgaggccagaagattggctgaggccaggagttcaaggctccagagagctatggtcacacccactgcactccagcctggatgacaaagcgagaccccatctaaaaaaaaaaaaagatttcctttattaaaaattcaaaatcgtagtagtcgtaggtagcaaaaatataaagaaaagcaagaaaattataccataaaagacaaaatacaggtcacctttccaggagggagggagctgtgaggcatgaagaggcatgaaggagcttctgaggaactagcaacactatttctctttttttctctttttttttttttgagacagagtcttactctgtcacccaggctcgcgtgcattggcgcaatagcaatattgctcactgcaacctccgcctcctcggttcagctattctcccagcctccagagtgtctgggaccacaaggcgtgcaccaccatgccccactaatttttgtatttttagtagagatggggttttgccatgttgcccaggctgctctcgaactcctaacctcaggtgatccgccccctcggccttccagtgctaggattacaggcatgagccaccgcgcctggcccagcaacactttcttaacctaactgtttcctttacaaaagtctctgaaacagaacaatatattttaattgtacgcaattctccccatgttatatttcataattttcagggatttttttttaatcccacgattccaaatctctgttcctcaaatgacgtggctctccagggggcggtgggcaaaagttctgagccctggcatggagccctggcacagagacctggtgcacggtgcaccaggaacccacaggagaatttgggatctgaaacagcaaatacaatttgattttcccagaagtgagcaaatgtgctgtgactctgtgtgaccacagtgggctgaagtgacaagttcaagggtaggtgatgttcagagtagaggccacaagccagcgcctccccgcccccaccccacctcctgcagagcgtgacgccagtaagagtggtcatctatttctcttcccaccagccaccccagagcctggctctccctgggaggagatgcaacctcaacaatcctgggccagtcccattctttttggatgtggaaattgagcctgcccaggattgcttggctgagaggctgccgtgttgggatttgctcctgacttgcaaccacctgactccacagggatgaggcagtagagacagccctgccccatcctcagtatcctgggaatgtgttggagggtatgggtggccccgactgggacactgggatgacggttggaaacaagggaggtgagtgtgccatgtcccggctcaaatgaggaagggcccagtgtgacctcggctttcccaggagcctgagggacttttgcatctgtatttttaaatgctggtggccacagggcaggttgtggccttgagtaggggaggcaccgacttccagggaaaaggctggagtttcaggaaagggactgtccctcctggataggcaccatgctccaccctgccagggtgggcttgagaagaggggcttctaattcaatgggagggctcctacttagggagtggctaggctgataggggtggcatgatttcccccaactcaagtcaagaaggaaccactaatctgatggaggaggcacataccagctccctcctggggaaatttatatttcctagtctaatttgatggacaaaacttaattttactcggacagcactcctagtcccaagaaggattcaagatttacagcgtagtgagctctagtctgatggaggaggcaggacccaaacccacccacagggaggtttcctatgagggtggaggcatgcctgttatcttcaggaagctctagtctagtctgacattcatccaaatgtcttctggggaggaggggcaaaattgctcccctcaattgagaatctagacagaggagggagtcatgctgccccaccccatttttttttccttttagatctagtcctgaacccagatgccccatgcatcttcacggaaccgatgggagaagcaaaatccacttttagagatatctaatctgtgaagaagtcacactttcattctcagggagattctgatctgatggaggaggaagaatgcaattcaaaccctcaaggaactcttacactgatgggaaacatgtccccaccttgggggcctccaagtctgatggcagaggtcttcctcccatccttgggaagctctagtccaatgagggaggcactcccccaccatgtcagtgccttccttcccgtaccttctccctgccctctggctgcccgaatgagcagggcagggggcttcccctccccacctccctggtgaatcctagaatcagggaacttctgcaggaggacaccacggttccccagccctgggacttccctttctccgtcagcccaaacccagggcctcactgggggggccagacatgcctgccctgctgatcatggctcacctatcaccccagcccccatgacatcacctggttattgcatgtccacagcatcccaggctccgcggggactttccatgcttgacctcgccagtgccctaccctgagagggaggagtctgtccccactttacaaacaaagcttagagggcatggcactcttgccagagaccacacagccagaaactggcagagtggggaacagaccaagtgggtctgactccagagccccagctccttaggaatgaggatgaggatgatgtacgtatacagtcctcattttctgccaggcaatcctgccaagggctatattgctgactcactagctcttctcggccatggtgttattattctcattgtcattattctgtaactcagacagggaaactgaggcccaaagagatagatgagtatgtagcagagccaatactcagtcaggttgtctgactccagtgccatcatcacagctcagctcccccagaagacagatgattatacggaattgggcatgcgaaagatttatggaccagcctgggaaacgt[142 bp omitted]catcgagaaaccccgtctctactaaaaatacaaaattagccaggcgtggtggcacatgcctgtaatcccagctactcgggaggctgaggcaggagaatcgcttgaacccaggaagcagaggttgcggtgagctgagatcccgccattgcactccagcctgggcaacaagagcgaaactccgtctcaaaaaacaaaaagaaaaagaaattagccaggcatgatgacacacacttatagtcccagctactcaggaggccgaggtgggaggatcacgcctgtggtcctagctactcaggaggctgaggtgggagaatcgcttgagcccaggaggctaagactgcaatgagctatgatcgcaccactgcacctcagcctcagcctgggcaacagagtgagaccctgtctcttacatacatatatatctcttaaatacacacacacacacacacacacacacacatatcttaaatatatatatgtgtgtatatatatacatacgtgtgtgtgtatatatatacacacacatatacatatatatacacatatatacgtatatgtgtgtgtatatatatgtgtgtgtgtatatatatgtgtgtgtgtgttgtgtgtgtgtgtatctatctatatatatatatatgcagggcacagcacctcagaaaggaaaggaggaagcaagaggagtgagcaagggggactgtcaagttgtaatgccccccctacaggaaggctcttgcattagagaagtcccaccctggtcagaaatggctagcacctctgaaccccacctgtcattggctggagactgcccaggagaccatgccccagccggtaagctgaagcagacctcaaaggagtcaactgccaatgtcagaggctgtctgctctctctgcatgcctggcagcaagatcaaaagtccgttttttttgtttgttttgttttgtttttttaaatttctgagacagggtctcactctgttacccagggtggagtgcagtggcatgatcatagctcactgcagcctcagccccccaggctcaggcaatcctcccgcctcagcctcccaagtagctgggaccacaggctcaccaccaccatgccaggctaatttttatatttttttgtagaggccaggcatggtggcttatgcctgtaataccagcactttggggggctgaggcaggaggatcacttaaggtcaggagtttgagaccagcctggccaacatggcgaaaccccatctctactaaaaatacaaaaattatccaggattggtggcatatgcctgtagtcccagccacttgggaggctgaggcaggagaaccacttgaacccaggaggcaggggttgctgcaccactgcactccagcctgggtaacaaagtgaaactttgtctcaaaaaaaaaaaatttgctgggcatggtagtatgtgcctgtagtcccagctacttgggaggctgagccaggagaatctcttgagtctgggaggcggaggttgcagtgagccgagatcacaccactgcactccagcctgggcaacagaacaagactctgtctcaaaaaaaaaaaaaatgtacttttttgtagagacggggtcttgttctgttgcccaggctggtctcgaactcctgggcccaggtgattctcccatcctggcctcccaaagcactgggattagagggatgtgccgccacacccagccaacaggttttttcttgaagggggatgtgagctgcctgtctctgtggctgccactcccatacctatatgaataataacaatcattttaaaataatatcttccatttactgagactttcctctgtgccaggcctgtgctgacgtgtgtgaattcatttgactctcacaacaccgccggaagacatgcactgtttttaccctcattttatagatgaggaaactggggctcagagagggtaaataaatcacctgcccagggtcacacagctggtaagtgacagaactgggattggaacccaaacaattagacagggccccattcacagatgaggacactagcccactagtacctgattgtctactgtcacctcgctgagaccactgtgaccttccttcctatgccccgccttcccagacccccatccacccacccagggcagatgctgatctccacactccccccaccgaatcacccctctctgatcaaggcagctggcaggggcggcggagagggtggggggacgagggtgtccagtctccctggcctgccaagagaggatgtcgcaatcctctgactcagcgtcgtgcgtgcagacccagcaagaggcagaaaggggaagattaagtcttggcttaggccccagatgggctgattctgctcaatgccaggagctcccagagctgccaaggctccagggtggggaggaaccaggaggtgcaggccatgctccaggaagctggcccgcattcacccgtgggggtggggcagagcagcctcagggagcggagccgtgtggacttccagcccagggcccagactggaggcagcctgaccttgggcatgtcccttcccatccaggcccagagtctctgtatccttctgtctgcggaattcacttgctctccctgaacctctctggaggctctagtggttgttcctcctcaagggactcttaagtctaactctatttttttttcttttttgtttgagacagggtcttgctctgccacccaggctggagcgcagtggcacgatctcagcccactgcaacctcggcctcctgggttcaagcgattctcctgcctcagcctcccgtgtagctggcattacaggcgcccaccaccacgcccggctaagttttgtatttttagtagagacggggtttcgccttgttggccaggctggtcttgaattcctgacctcagatgaccctccagtctcagcctctcaaagtgctgggattacaggcgtgagtcaccatgcccggccccttaagtctaactctattccctcctgctgcaatgccatcctctctccacgcacggaccctccccataccaggaggcagcagagaagagttccagggtgcgaatctccatgggtgtcctcggacatatgactttccctctccatgcctcagtttccccatctaaaccatttcttcccagggagaaggggcctagaatcaagctggaagggcacacctgcagtctccgagactcatggccacttctcccaggtcagaagcgtgctggggtcacagggacctggcttgaaatctcagctctccccagttcctcaccgtgtgacccgggcagtgagttcacttctctgtgcctgtttcctcctctataaaattgggtttttagctgaattttccttacaaggtgttaagaggattaagtgggccaattcttagttgcaactcagcccggagtgaatgtttctgtcttgtctcctctgtgagtagaaaagggtgagaaggaggccctggtctgctggatagggtaagggttaaggccagcagcgtggagacagaaatgaacattattcattcatttattccacacacttttcttatttaatctgctcagtaagcctgtgaaacaggatctgttatcatcctgttattattattattaccattattttgagacagagtctcactctgtcacccaggctggagttcagtggcatgatcatagctcactgcagccttacacctaaagcaatcctcccaccttaccctcccaagtagctaggactacaggtgcctcctga[132 bp omitted]aacctcgtctctactaaaaatacaaaaattagctgggcatggtggcacgggcctgtagtcccagctactcaggaagctaaggcagaagaatcgcttgaacccaggaggtggaggttgcagtgagccgagattgcgccattgcactccagctgggtcaacaagacggaaactctgtctcaaaaaaaaaaaaatctgtagagacagggtgtccccttgttgcccagactggtcttgaactcctggtttcaagggattcttccttctaccttggcctcccaaagtgctgggactacaggagcacactccatgcccggccccattcgccactattaaagtcacaaggggctgggcatggtggtttatacctgtaatctcagcattttgggaggccaaggcaggtggatcacttgaggtcaggaggttgagaacagcttggccaacatggtgaaacccagtctccactaaacatacaaaaattagccgggcatggtggcggacgcctgtaatcccagctacttgggaagctgaggcaggagaattgcttgaaccagggattggagattgcagtgagccgagatcatggcactgcactccagcctgagcgacagagcgagactccatctcaaaaaataaaaattaaaaaataataaagtcacaaggaaggcacagagagggaaagccacctgcctaaggtcacataactagcacatggacgagccagggctcaaaactatgtctctaagcccagcatgttgaattctattttccccaatgaagcaggtcctgctattgaaaacacaggatatttgatgaggacaataataatatataatgttatattattattattattattattattattattattattataaaactaatagcagctaaattgcatcaagagccttctatacatcagaccccatgggacagagtcatattttcttgatgtgatccactctacagatgaggaagctgaggctccacgaggttaagtaactgcccggaagtcacaaagctaacgatcaggagacag[138 bp omitted]aacacagtgagaccccctgagtctacaaattgttttttttattagccagtcattgcggcacatgcctgtagtcccacctacttgggaggttgaggcaggaggatcatttgagtccaggagttcaaggctacagtgagctatgatctcaccactgcacttcagcctgggagacagagccagatcttgtctcaaaaaaaaagcaggacaagacccagtaattgagccagatgggaacttaggccctgaccagccctactctctcctcttagaaagggaaattgaggcccctgagagcaagaaagctgcctcaagcctacagacttccagatggaatttcgtttccctctcaggactttgagcaggtaaattcctggcctttcctcccccaggatgggttggggaaaaagaaacagcagctggggaggagatctgaacaggtacaaagggcggcctgcatgaggggaaagtggttagacaccaagcagaacttcctggcctcctctgggaagtttctaagactcatccaggggctgcccctgcgggtgggggccctccagaggccaaggcccagagaaaggagaccctagtcctttccgcctggggtgcaaggagccgggggagggtgggggtggccatcctggttccgcatcctccgttcccgacattggagggaggctgctgtgggagctgggactttcctgagagcagaagattctgggaaattagagacagctgcagggcggggctgcctcccagcctcccttcccttccctccccttggtccctgctggctccggaggcacgcctctccacccctccaccccaccagctcctcctcccctagtccatgccttccaccctcggaccctcagatcttttcccctgagcctctttcttctccctcagatctggcctctaccctcagactctctccaaatcttctttcctcagacccttctttcccctccaactctctcctcctccctcagagctgcgtcccctcacttagtgcttctcagacttcctcagactgtgccctctccctcagatactctcccctcccctcagaccctcacctcctcactcagaccctcacttcctccttcagaccctcacctcctccctcagacccttacctcctccttcaaaccctcacctattctctcaaaccctcacctccttcctcagatgcttatctcctccttcagaccctcacctcctccctcagacccccacctcctccttcagagcctcacctcctctcagaccctcacctcctccctccaaacctcacctccaccttcagacccttacctcctcctttagaccctcacctcctctctcaaaccctcacctccttcctcacatgcttatctcctccttcagactctcacctcctccctcagacccccacctccttcagaccctcgtctcctctctcagaccctcacctcctcccttagcccctcatctcctccccccgaacctcacctccaccttcagaccctcacctcctccttcagaccctcacctcctctctcaaaccctcgcctccttcctcagactcttatctcctccttcagacccttgtctcctccctcagaccttcacctcctccctccaaacctcgcctccaccctcagacccttatttcctccatcagacccttacctcctccaacagaccctgtcctcctccttcagatcctctccccctcctcccactaaaccatctacttctctctcagacctatcttccttcttcagatcctcctccttctgacccttttatccctcttccaacctcagagaaccatcagcaccctctcttccagcagcaccgtctctcccagcccttcgaagctcccaccggacccatcacatcttctcccctctacagtcctgctaggttggaaccactgcaccagctgccctgggatgccaggagtgggacaggcttgggtgtccttcccaccctacctctgagggtccccaccctaagcctcgcccctccaaacctcagctttcctttctgtgcattgggatagtgctccacacccctctcctgtgtctgagggtccccaggggtggggttggatgggcagggaacacagcccccagcctgtccaaccgaattcctcccctcttcccttgctgtggcccccacaacaccagcaggcaggggttgccattggtcccattttccagaagaacaaactgagtctcaaggcaggggatggcttgtctgaggtcccaccgggagcaaggggtggaggtggaattaacacaggtctgtgctcgggatgtttcgccatgaagggggataagggagatccagagagaggtcgaaaggaagggaaggggtgaggcctctccacacagccacttctcacatcctgggttaacgatccactcgggtggggcccgagtccggccaaagtcccttcccggggccccaatacccactttcaaggtcccaggggacacagagacagcaacagagatggggagacagagacagagggcggggcaggagacaaccagagggaggtcaggcaagtttcgaagacagaaggagaccgggggagagaaccagagagacgccgcgtgccccctgggcaagtccggggtgcagcccccatgccccgccccctgtgtccccaaagcctccctctccgcctcctgtgactcagtgacccggactcaaccccagcggctgccccgcccccagggaaatccgggaaagccccggaccttcggggccccaccccggggcggggagagggagaggaggggaggagacggggaagagtcccgcctccctcctccctccctcccatctccagcctgagtcatgcccccaacccgcctagcctgttccccacccatcaacccctcctcgaggtgggaggggaagtcggggggaagccaaactgctccccgctcctgcagcaccggcctcggtcgcgctgactctggcctggtgtccgtgtctcttgctatctctctttctctcaagatctctgcgcctgtctccatgtctctttctctctgtgcacctaggattttccgagcacccaccccggtgccccgcgggccccggctgggggcagggcccccaacgagtgcagagacacaatcagtggagcgctccccaccctcaccccacccccagcccctttagacccacagctgatgaggcacgtggagtggcagagatggaagaggggagggagaggaatcgttcctggccgcctgccgagtgccagtccctgccccgggtgcgtctcttcactcccactaaggaggaaacggctcagagaggggaagtgtttggccaaggtcacccagcgagtaagtgggaaccgagattccaaaccccgtcccagagatgccaaggcctcctgagagacagagaagcagacagcaactgagaggcagagagatggtgacagacacaaagagacaaaagagagagacagagacggaacagagcacacagagacaaacgcggggttgcggagagaaacacctactcagacaggagaaccagagagacagttacagactcagagatagagatgttgagagatagggccagaaagacaaaaacagaggcagagagagcggcccttggcagcaggggtggggacacccccccaccccccgaccccgcctcctctccccccacccctcctttcctctccctcccccgccgaggcctggctgccccaggcgccgcgggccgggagggggcaagcggggcgcggcgcgggcggggcgcagggcaggctgcacctcagagcggcgggagcagcggcgggtccaggaaacccctggggcgtacgggtggccccgggggggccgggggcggggaggcgggcggccggcaccgccccggccgacaaaagtcccttcagttcagccggctgcaggggaagtcccggcgcccggcgaaaccaccctcccgtgcagccgagcccagccgctctccggccgccgtccccggcggccccatgccccgatgccccgcgggggccatggacgaggggcccgtggacctgcgcacccggcccaaggccgccggactcccgggcgccgcgctgccgctccgcaagcgcccgctgcgcgcgccctccccggagcccgccgctccccgcggcgctgcgggccttgtcgtccccctggaccctctgcgcggcggctgcgacctgccggcggtccccgggcccccccacggcctggcccggccggaggcgctttactaccccggtgagtggcccccgagggtccgggccgggtgggatccacacagagcatagggtcaccagagccaggaggcagagcttgaggcacaaaccggtgtctctccagggacctgggggacaagaggatataagcccaggttccaaggatatagatatgagatcatcggggagccagtaagctgtgccttgggatctggggatttggggaccctggggggcaaagcccaggggctgagtgacgtgggggggggggggccagggacaatgcccagtggtacaaatatgggggtgtcagggaatcagggcacagagcctggtatcctaggggcaagaaagtacaagctcttaagccagatgtgtagcgttatgaggaagctgagctgggctggagaaactggggttccctgtatcctgatattattagaatcaaagggagtcagggtaacagagactggggttctaaggagacagatactgaggatctcaggatgtcacaatctcaggaaccaagatatctggagacatgggcattatgaaaacagagatggggttctgagcaccccaatatctgggatcacaaggatccaaggaaatgaaccagagctccagggacccagataccagggggtcttgaggacccaggagaacagagacccgggtttctgggtactcagttatgtggggccacaagtgatcagggtcctatttgaggtcaagatcaggtgggcagaagggatcaggggactgaggatcctaagattgggtaattctgagactttgggtaatttagaggcaggatgaaaatttcaggggtctccagacagaaagcctcaaggcctcaaggcctggtattggagatacgaggacctggaaacttgggagttcaagaacagagggcccacaaggatcagcagatgacgaagaccacacactcttctctccatcctatctccatccctgatctcaagaaggggtgtcctctaccacagctgtggccacgtcaccatccccaattgacccccaaagctgcagagagccgttctacagagccccaaaactttaggtagtttctgcaccctccaccccatcagcgtgacagctggagagcctcaagctatgtgcatcaggagttctgccacggcctcccagctttcctattccaagagtgagaaagcaggcctcagttttccccgtctgtgtgatgggttggtatggatttgcctgctgccatggtcccctcgcctttgtttgtttttgtttttgttttttgagacagagttttgttttgctctgtcgcccaggctggagtgcattggcgtgatctcggctcactgcaacctccgcctcccaagttcaggggattcttgtgcctcagcctcccgagtagctgggattacaggcatgcaccaccacacctggctaatttttgtatttttagtagagacagggtttcaccatgttgcccagactggtattgaactcctgacctcaggtgatccgcccgcctcggcctcccaaagtattggtattagaggcatgagccacagcgcccggcctgccgtggcccctttttaaacagtttgatctaaaattacccatgcgtggtggtcagcatctgtaatcccagctacctgggaggttgaggcaggagaatcgcttgaacctgggaggcagaggttgcagtggggcaagatcgtgccactgcactccagtctgggcaacagagcgagactacatctcaaaaacaatttgaacaggcttctggtaacacctcctctctgcctccactctccccaaacccactctacatttatcccacaccctgcacccagcaattcatcagccacaaaatcactctgcagacagtccctggggtcccctgctaggtgatgatgggtgcaccctctgttcttaagggaccctttgtctgattggagattgaggtcagaagataagtgacaatgagggtgaccagccctagagggagaggaagctgccagagcccagaggagggacgtggaagggggtttgttttaggccctgaggaccctgtatgggatgcaaaagggacccaggagaaagggcaggtgacaccacaggagcaaagttttagaagtggggggcgggttgagggtctgtgggtgtggcctcacccatgtcccttctctgtcctccattgtccaggagccttactgcctttgtaccccactcgggccatgggctccccgtttcctctggtgaacctgcctacacccctataccccatgatgtgccccatggaacaccccctttctgctgacatcgccatggccacccgtgcagatgaggacggagacacgtgagtgacagtcccctattaaggggaggggtggttgggaagaccagccgtccataacacagggccactcagctcccagtggacctgagtcagaactcggtctccaccacaggctgtgtgaccttgagtaaggcccttccctgctctgagcctcagtttcctcctctgaagaatgggcaccttgagagcatttacctcctaggccactatttttgtttggtttttgtttttgtttttttgagacagggtctcactctgtcgcccaggctggagtgcagtggcacgatctcagctcactgcaacctctgccccccaagttcaagtgagtctcatgccacagcctcccgagtagctgagactacaggtgcccactgccaagcctggctaatttttgtattttttggtagagacagggtttcaccatgttggccaggttggtctcaaactcctgacctcaagtgatccactcgccttggcctcccaaagtgctgggattacaggcatgagccccaagcccacccctagaacactatttttggaacggtggtctttagatattttgtcacaacctaaaaacaagaaagacagttcattgattaacttactatatgaattatacatgtaaaactatcactggacctggcataaatgttgagtaagtgtttgttaatattactattattttatctcaaacccagcacacacacacacacacacacacacacacacaaacttgaaattaaaattgcacaaaatgaaacaatactcgcccttactatgtgggttctactgtgacattttctttttttctttttttctttttcttttttttttttctgagacagggtctcgatctgtcacccaggctggagtgcagtggtgcaatcatagctcactgcagccttgatctcttgggctcaaatgatcctcccacctcagcctcctgagtagctgggaccacagacgctacccccacacctggctaatttttgtattttttttttgtagaaacacagcagtcttgctatgttgcccagactggtctcaaactcctgggcttaagtgatcctcccacctcagcctcccaaagtgctgagattacagatgtgagccaccgagcccagcttacagctttactttgccattttctattctagtcgacttcattgtttcatggtcacagcccactacattaatttgaagatcccctaaattgatttcacaacccccatggtttatcacctgcagtctgaagaacatgtttgtgaggctgctgagaagtcctgcacgggagggtttggtctgtgcctagcacatagtaagcactcactgcaattgatcatcatgattcttattattctattgacctgggttggaatctcagcgtggccacgttctactccctctgtgcctcagtttccctctctgtaaaaacaggaaccatcgcgtgtgagggtctctgggaggaagaaatgacatgatttatacaaagcacttctgtgagaattagtttggggcctggaaaccacaggtagagatgaacaggcctgtttctgcagagaagtagcagagggctgctccgccactggcccactgagtgatttcatgtccctgagtctcagtttccctatttggaaactgggtctcataatagcacctatcacaattaggattcagtgagatcttgtacacatgtattaatacagtgcacagaacagggctgggcaaacagtaagtgctcaatgcatggaaatgggtaatgtttgagcagagctcccagggtggttgcaggccatctccagagccctagcaggagaaagtggcctagattataaagagctaataaaacctagttccctccccttctgggtacctctggggggtcatctatgaaatgggcttaatcagacagtctctgcccccagtggtgagctgtccatgctgttgaaaagcagggtgcttgccagaggccacccggcccaccagtctccagccccaggccctccccacaccctccctctccgactctcccccaaggcaaacacttctgcctcagctgcctgctgggggaaatcccttcccgcagaacttgaccgcaacccagctgctctgcctcccccacgtcagcacccgtcactcactcgcagcctcccccctcctggcgcttcctccaaccttaaccccttccgctggggctgagactttaccggaacgggcagcggcccggccccagcctgcgccaccggctcctcttcacacccgcgggggagggcagtgggggcgaggagggcgggggacgctaagtctgggtccccgcagaagccaaaaggttgggaggctgggcttccatctcctcacaggcgggtacgagccttggggcatttggacccccaagaggttagggactgggcagccagaaacctggggagggggcaggaaggcgggggcggggggggggggtgatgttctgattctcagaaggcagaagttggggaactgtattccttaatctccgaggggatgaggagcagcttggcagcttggggacctggcactcagaggggctttacgggcaggaccagatacagaaatttgcagagtcccttgttcaaaacttaagaatttcacgacagcggcagcaggacgttgggctggtgaaactggtcacgccaaggggcctgaaagtctgtgttcccaaagggccagggtttgaggcgctgtatttctgggtctctgaggggacaaggactggcaaggtagtttgggatcctggagctctgaaggacgggggaagtccttattcttaaagaagagttagggctatttctggctcccaagagatgttgggggtggatgccgggataaggaggacttgcagccagctggagcctgagctctgcggggtggagttccagagggtcccccaggcgggaggactcgggattatgcgccccccctacacacacacacctcaagggagctaggtcttcttgggctgggcactcccttcccccgccccattcgaggatggaagttggggtgccaggggtggccagggtagatccccggcgggacaggcttccctcccccgggagcaggaagcagagccccgcccagcagacctgttactggaagtccgagggctgggtcgcccctcccgtccccacttcctccagccccgccccaccccctgcggcccgcgcgtttatgggaactcaggcctggacggtttctctgaaatcattcgctgcgtctgccctcacttaaccctggccgccccgagagggacccaggccaggcgtcctgggagatgcagagaaggggggacccttcccagggaccccggcccctccctcaacattttatttttaaatttggctttcacggattaggagtcaggttcagcgattcacctgcgtgatctcaccctggcatgtggacgctgtactttacataagagaaaactgaggctccgaaaggcccccatggctttgccctagcacgcggctacgctaggaggggttgtggcccaatttgcaactctggccccgggatttctgcactccatcagaaccacctgggaggctagtttaaactggattctagagacacattccacaagagaaacgggtgctggtgagaaaggaattacttagtaaactttaaataaagatcctgccacccactgtgtacacgcagtcctccttgggtcctccactctgtcccccaccccatgcaaacagcacaggcgtgcacaagcacgcacgcatgcacacacaccagtctctgaatagctgttctaggttggggtctctggaaactgagcaggaagtttattggaaatgctctccatcaacacctgtgggatgaaggaagcccatctgggcagagggagaagttgagctgctgtgtcgcctccacacggcctcagctgtcccacagggaatattgaagctggaatggccttcagcattggggtcaggaggctaggccttctatgctggcattaaccagtgactggatgccattgaagggcagctgcccttgattcacatggggcgtgaccttggacaagcagctctcttgagttgagggtaattcccaaatggtctgaaagctgacaatcttcccagaagctgagggagtgagtccttcagtctagaagggggttctggactgtaccgcctccagaacaatggccccatccca[137 bp omitted]ggccaacatggtgaaaccatgtctctactaaaaatacaaaagttagctgggcgcgatggcacacatctgtaatcccagctactcaggaggctgaggttggatgatcgcttgaacctgggaggcagagattgcagtgagcacaagatagcaccactgcactccagcctgggcgatagaacaacactccgtctcaaacaaataaaataaaataaaataaaagggtccctctggctgttgtgtgggggacagacagtagagcataggtggaagcagagaagccatgaggatggaactgtactagaccagcagggagccagtggtggctaaagcaggatggagggagcgggtggtaaatcaggatggagggagtgggtggggagaagtgtttgaatactggggacatttccaaagtattcaacacattggagttagcattgccaacagcatgagggtgagaggtgaacaacccctaatgcctgtgattccttcactcccccacccccaggcctctccatattgctgtggtgcagggtaacctgccagctgtgcaccggctggtcaacctcttccagcaggggggccgggagctcgacatctacaacaacctacggcaggtgaggctcggtctgagggaggagggctggggcctggactcctgggtctgacagaggaggggctgggggcctgaactcctgggtctgagggaggggggctggggcctggacccctgggtctgagggaggagggactggtgcctggactcctgggtctgatggaggagggctgcgggcctgggatccggggtctgatggaggagggctgggtcctgggctcctgagtctgagggaggagggctggggatctggactcctgggtctgagggaggagggctgggggtctggactcctgggtctgagggaggagggctggggtctggactctaagtagcgaggtgctccaggctcctggttcctggggaagaagggctctggggcctcggactggttgttcctgagagggagggggcctaaagacctcctagtgaggagggagggggctggggacccagaattcaggtactagggaaagaggaggttggaggcccagtcttctgggtcctggggaaggaggagcatggggcccggactcttgaatctgagacaggaggtgtctcaggtttctgttcctggggaagactgcaggatgaggaataagggttcagaaaacctgggggaggcaggactagagagcagggctggacacaggtccctcacagtcactgttccccagacaccgctccacctggctgtgatcaccacattaccgtctgtggtccggctcctggtgacagctggtgccagccccatggcgctggaccgccatggccagacggccgctcacctggcgtgcgagcaccgcagcccgacctgcctgcgagccctgctggacagcgcagctccgggcacgttggacctggaggcccgcaattatgacggtaagcatttaccgcggggcaccgctgggctgtccagcggacctggagtccatcagcggccgcaaagcccgggcctaggtttcaccgagccctcctctccctcagggctcaccgccctgcacgtggcagtgaacaccgagtgccaagaaaccgtgcagctcttgctagagcgcggtgccgacatcgacgcagtggtgagcgtgcactaggagctgggagggagcggggccttagcaggggcggggtcttggcgggggcggggccagtgtggggctggcgtgggagagcacccgggtggggtggggcttggagtatcagacccaagagagaggctggaccccgcgaatgggatgtggacgggatgcgggtcgccggctgctggagcagagcttggagaaactaagaccttccctccccgccgcaggacattaagagcggccgctccccgctcatccacgccgtggaaaacaacagccttagcatggtgcagctgctgctgcaggtgcgtacagcccccctgagcctcgcgcccaccctatcctctgaccccaacccggctctggcctcagcccctagctctgaccccgccttccacttctggctccggctcctgctccgcgtccagctctgatcctttaaggcctagttttctcgaccctcgggctccacgcccctggctacgaacttgtcccattcctcctctgccacctcaacggcctaggccccgccctgcgatggcctggctgaccccgccttccagctaggccctgtccacgcattgtccttcccccctccagctcccccgactccttggggcgcgggcctcggtgtccagctccggttaattcatcgccgccaacgcagtcccgcttggcctgcccttggctctcgctcctaccttcctgtgaccccaccccgatccggtgccgccccacgtgccggccacccacccgggcctccagcctctgttcccttaccccgggtggcccgcgcgccctcctgacccggccctcccgtcccgcagcacggcgccaacgtgaacgcgcaaatgtactccggcagctccgccctgcactcagcgtccggccgcgggctcctcccgctggtgcgcacgctggtccgcagcggcgctgacagcagcctcaagaactgccacaacgacacgccgctcatggtggcgcgcagccgcagggtgagccggggcagctgtggacatgccccttgcacacgtgtgtccgcgggctggttgcaggcgagtgtgccagagcgcagaggagtgagggtgtctgtgccgttgcgtggaggggagtgggtgagcctctgaaagcgcgggtgtgagttccagaaatgaggagagactggcaccaagaaaaaaagtgccttgcccatcttttcatactgagaagtggagaggccaccacctggatccagtgagctaggagggatgggagagaggactgtgaggcatgggtggctctatggtcacgcccatcttcctacaggtcatcgacatcctgagggggaaggccacccggcctgcttccacctcccagccagacccctcccctgaccggagcgccaacacctcccccgagagcagcagccgcctcagctccaatggtgagaaaccgttcccaacctccagccctggcgcctcctccctcagacccaggaatcccaacccacagcccctcctccctcagatccaggagtccaggcccctagcctcctccctctgacccaggaatcccaacccatagcccctcctccctcagacccctggcccctcctccctcagaccccagcccctcctccttcagaccccccagcccctcctccctcagacctcagcccctcctccctcatacccccagcccctcttatctcaaacctcagcccctcctccctcagacccaggagtccagatttccagaccctcctccctcagacctcagcccctcctccctcacacccccagcccctcctccttctgacccccggcccctcttccttcagacccaggagtctaggtccccagatgcctctttcctcagacccgggagtttaaatccccagcccctcctccctcagacccgagtccagacccccagcccctcctccctcagacccagatctcaggccccagcccctgctctctgggtctagcctctcaccacccacccctctgtctctcttccttcctcaggtcttctctccgcatcaccatcctcctcaccctcccagtctccccccagggacccccctggattccccatggctcctcccaatttcttccttccttccccatctccacccgccttcctgccctttgctggggtcctccgaggccctggccggccggtgcccccctccccagctccaggaggcagctgagggggatgggggggcagatcttggactcatgaggaggggcccccctgccctgtggggtcaacccttctggaaactgtgaagatctcactctgccccccccccccatcttcgggaccaggatttgcacagaagcacatgcacctacccatacaccccctcttctgagcacagatgttcccccatctcgctccctcccaggactctgaccccagcattctcaggcaccagtccctgtccggaatgccacccacatcttccatttccatgtcccctcccagagctggtggacccagggaacagccactcccctccactctctaccagataactgaggaggggagaggtgggccgtaacgggcacggatcacgatgtaaattattaagcattttggttggatttcttttgtaataaactatttttgtaccatatcccttgggtgcatgggcctctttcatgagatggacctggcggaagtgccttcgtgtgtgtgcacacccgtgcactgaatccagttgactcccagagtgatgttgtgagtctcagacagacaatctcctgtgtgtcactctgggacttctggtgtgtttggttgtgaatgttgccatcattgtcactgtaccattgtttctaaggaggacgtggtgtgtgatatcttttttttttttttttcaagacagagtcttgctctgtcgcccaagctggagtgcagtggcacgatctcggctcactgcaacctccgcctccccggttcaagcgattctcctgcctcagcctcccgagtagctgggattacaggtgtgcaccaccacacctggctaatttttgtaattttagtagagacggggtttcaccatgttggtcaggctggtcttgaactcctgacctcatgatcctcctgtgtcggcctcccaaagtgctgggattacaggcatgagccactgcacctggccggtgtgtgatatctttccagggcaccctgttggattccgtagtgaccctgggcatgtgtgtttctgtagtgtgggggtcctggtgataacccacagctgacttcagccccaatcgtctctggctgtccgagtgcgtggtgcttgggagtgttcctaacattgagatctggggtgatgctgtgattgttgccctgtgactgcctcacatggcgtgagacagttttacttagtggttccatggggcccctctaatggaccacatctgtggttttgttgttgtttttttggggggggatggagtctcactctgtcacccaggctggagtgcaatggcgtgatctcggctcactgcaacctccgcctcctgggttcaagagattctcctgccccagcctccagagtagctgggattacaggcacccaccaccatgcctggctaatttttgtatttttagtagagagggggttttgccacattggccaggctggtctcaaactcctgacctcaggcgatctgcctgctttggcctcccaaagtgctgggattacaagcgtgagtcaccgcgcccagccacacatctgtgctttgactctggggtatgcctctgtgtgtcagtcggggtttgtaatggtttcctgttgccactataacaaatcacaaattcagtggcttgaaatgatgctaacttttttttttttttttttaaaacagagtttcactctgtcacccaggctggagtgcagtggcacaatctcagctcactacaacctccacttccctggttcaagccattctcctacctcagcctcccaagtagctgggactacaggcgtgcaccaccacacccggttaattttttgtatttttactagtcacagggttttgacatgttggccagactgatctggaactcctgacctcaagtgatccacccacctcagcctcccaaagtgctgggattacaaaaggtgtgagccaccgtgccagccaaacaatact[187 bp omitted]gtggcgggcacctgtagtcccagctactcgggaggctgaggcaggggaatggtgtgaacccgggaggcagagcttgcagagagccgagatcgcaccactgcactccaacctgggtgacagagtgagactccgtctcaaaaaaaaaaaaaaaaaaaaagaagtccaaaattgaggccaagcctggtggctcacacctgtaatcccagcactttgggaggctgaggcaggagaatcccctgagaccagaagtttgagaccagcccgagcagtatagtgagaccctgtctgtacaaaaaaaaaaaaaaaaaaaaaattagctgggcatggtggcaggcacctgtagtcccagctactcggaagactgaggtgggaggattgcttgagtctgtgagttcgaggctgcagtgagctatgatcgcaccacagcactccagcctgggcaacaggtgaggccctgcctcaaaaaaataaataaaagaaccatggtgtcagcatctgcttcttgtggtgaaggcttcaggctgcttctactcatggcagaaggccgagggaaccacacgtgtgtggggatcaagtggcaggaggggaagcgagagagagacagagagagagaagtgccagcctccctttaacacccatctctcatgggcgtcaatggggagaactcattcacccgccagggaggacattaatctattcatgagggacctgcccccatggcccaaacacacctcacatcaggcccacctccaaccttgggaatcaaagttctttttttttttttgagacagagtctcactctgtcgcccaggctgcagtgcagaggcccaatctcggctcactgcagcctttgcctccaaggttcaagcgattctccagcctc[212 bp omitted]tctcactctatcacccaggctggggtgcagcaggagatcctagctcactgcaacctcgacctgggttcaagtgaggggatcagatttcaacatgaggttttgaaggaaaaaatattcaaaccatagcactgagtgttttttgttttttatggggttttttggtttgtttgtttgtttaatctgtgggggcttctctgggtcgtcatgtgaattgctgatagtgaacatttaatccccatcactctgtaatgtagttgcatctgtggggccagctgccttaacaacttcctggatggcatcactggggtctgtgaagggctgtgtgtgtgcacacaaacactcatgcacacgcacttctggatggcctgtgtgagcactgactgggtgacctgtgtgtgcctggcccgcctgactgggacgtccatgcgtctttctgtttgcaactatgtttcagtgtttctgacccagaccctgtgctctggtatctctgaagctgccag[136 bp omitted]atcccgtctctgctaaaaatacaaaaattagccaggtgtggtggtgtgcacctgtaatcccagctactcaggaggctgaggcaggagaatagcttgaacccaggaggcaggggttgcagtgagccaagatcacgtcactgcactccagcctgggagacaaagcgagagtccgtctcaaaaaaataaaaaataagaaataaaaaatcctgttgctgccatgcaaactgccacaaactaggtggcttaacacaacagaaatgtattcctttacagttctgaagtccggaagtccaaaatcaaggcgtcggcaggaccgcactcaccaaaaactgtaggggagactccttccttgcctcttccagcttctggtagccccaagcattcctccgcttctggctgcatcagtccagtctctgcctctgtcttcacatgatcttctcctttgtgtgtccatgtcttcttctctgtctcttatgaggacatttgtcactgagcacagtggctcacacttgcaattccagcactttggggaaggcaaggtgggaggatcacttgaggccaggagttcaagaccagcccagacaacatagcaacaccctgtcttgaagggaagggaaggggaggggaagggaggaaagagggagaggaaggaaggaaggaaggaaggaaggaaggaaggaaggaagcaagcgagggagggagggagggagagattatttctatgtttcctggtcaacatagtgagacgctgtctctacagaagatcaaaaaatgtgttggctgagcatgagcctggtggtgtgtgcctgcagtcccagctacttaggaggctgaggttcaagcatcactttagcccgggatgtcaaggctgcagtgaactatgatcacgccactgcattccagcctgggtgccagagggagatcctgtctcttgttttgttttgttttgttttgttttgttttgttttgttgttactaagtctcactctgctgcacaggctggaggagtgcagtggtgcaatctctgctcactgcaatctccgtctcccaggttcaagcaattctcctgcctcagcctcccaagtagctggaattacaggcatgcatcatc[132 bp omitted]ctcctgcctcagcctcccgagtagctgggactacaggcacccgccaccacatccagttaattttttgtatttttagtagagacagggtttcaccatgttggtcaggctggtctcaaactcccgaccccaggagatcctcctggctcagcctcccagagtgctgggattacaggcatgagccaccgcacccagccaatatttatgtttaatccttagagcaacttgcaggtttgctccaaggtttaaacatgaacactagtcaagctaattgtgctcctctcctcctatgcagtggcggcaaacagcagtgccctcagtagtatacgcagcctgctgcgtgtagcggtggccttaagagaccttggagatagccctttccgatgcatgttcatgtttctgatcttgacctcaccccagtctagactccagacaggtatgcgaggcgcctttggaaagccccagggtgtggtggccagggttcacattggctaaggcatcacgtccatccgcaccaagctgcagaacatggaacacgtgattgaggccctacccagggccaagttcaagctccctggccaccagaagacccacatctcaaggcggtgggactttaccaagtttagtgcagatgaatgtgaagacacggtggctgagaagtagctcatcctggatggctgtggcatcagatacatccccaatcataggcccctggaatagtggcgagccctgcttactcacacccaccaataaatcctccttcctgtccaaaccgaaaaaaaaaaaatatgaacgggacacagtggctcacgcctgtaatcctagcactttgggagctggaggtgggcagatcgattgagcccaggagttcaagacaagcctgggcaatatggtgaaaccctgtctctccaaaaaaaaaacaaaaattagccggtatggtggtgcacgcctgtagtcccacccactggggaggccgaggtggcaggatcacttgagcctaagaggtcaaggccgcagtgaatcaagattgcgccactgcattccagcctgggtgacagagagagaccttgtctcaaaaaaggaaaaaggtggggggaagtaaattttgtgcaatacttattacaggccatggtgctgagtaagagcttcataaatgggaattgctgttgccatcatctaagaatttttgacagttttgaggtcagaggaaacacagtagagacgatgagacctattctttgtcctggtagaaaaatggaacaatgaggtcatagcctagatgtgtgttttagctacattttttttattccacggttgtaattaaattaaataatatagctgggcatggtggcacacacctgtagtcatagctactcgggagggaggctgaggcatgaggatcacttgagcccaggagtttgagaccagcctgggcaatgtagtgagaccccatctcttgaaagagtgaagtgactcgcatctgtaattccagcacttttggaggccaaggcaggagaattgcttgagcccaggagtttgagatcagcctgggccacatagcaagatcctctctctacaataaaaaaaaaaaaattatattaggtgcctgtggtcctagctattcaaaggctgaggcagggtgcagtggctcacgcctgtaatcccagaagtttgggaggc[134 bp omitted]aggctgaggcgggagaatggggtgaacctgggaggcggagcttgcggtgagctgagatcgcaccactgcactccagcctgggtgacagaggagactccatctcaaaaaaaaaaaaaaaaaaggccgagaggagtttgaagctgcaatgagctatgattgcaccactgcactccagcctagacaacagagagagaccctatctttaaaaaatatataaaacaaagagcctgagtaacatggcaaaagcctgggtaacatggcgaaaccctatctctacaaaaaaaaacgcaaaaattaaccaggcatggtagcgtgcatctgtagtcccagctactcaggaggctgaggtaggaggaccacttgacaccgagaggtcagggctacagtgacctatgactgcaccactatgctccagcctgggtgacagagtgagaccctgtctttaaaaatataataaataaaagaagaaatatagtagcttttttttttttgagacagagtcttgctctgtcacccaggttggagtgcagtggcaaaatctcagttcactgcaacctctgcctcccaggttcaagcgattctcctgcctcagcctcccgagtagctgggattacaggagcctgccaccacgcccggctaatttttgtatttttagtagtgatggagtttcgccatgttggtcaggctggtcttgaactcccgacctcaggtgatcacccaccttggcctcccaaagtgctgggattacaggcatgagctaccacgtccacccaatagtagcttaaataagatgaaagtctatttttctctcatgtaaaggcccagcgaacacccgcatctagaatagtagccaaggatgtcagagatcgaggctccttctacctggttgttctgctgccctcacctcacacttccattgtgtggtccaaaatggctgctccagctcccaccatcacatccacattccaaccactgggaagaagaaacaaaagtcaatcgcatgcccctacctttaaagctacaacccagaagtcatacacatcatacacatcacatcctatttggccagaatttagtcacatgaccacacctatcacaacagaggctgggaaatgtggttttatctgggcagcatgtacccagccaaaattcaggggttctgctacaaaaggaagaggagagaatggttattgaggggccgcacatgtatctgtcacaaccagggctctgccaccaaatgactaaatgactcaaggtgaagtgacttcaccacactgagcctcagtttcctcacctgtaagaagggaatccccccgaccccttggggttgatgggttgttgggcatttaatgagagtgtgagtgtcaggcacttagcccaggacctggcccatcatcagtctggagtgtgttggaagtcctcttgtgcttgtgggtctaggctgtgggtgatgtggcttttcgtgtatgagaaaccgtcccggggcttgagagctgaacccagcactgaactttataagtaacttctctaaaacaagggatctggcctctgtacacatggaaatccccactcagcctcctagaccttgggactaggcacatgtccttccacagtcttcccccttccgctggagaaaggcagactccaaagatggaggaagggtcctgcttggggtctccagcctcccagccttcacagaattaagcactcatagcctggccaacatggtgaaaccccgtctgttctaaaaatacaaaaatgtgctggatatggtggcacacatctgtagtcccagctactagggagactgaagtgggaggattgcttgaacctgggagggggaggttgcagtgagccaagatcgtgccactgcactccagcctgggtgacagaaaaataataataataattcaatcactcacccctcaacttccaaagctcctcatgggtgacagtcccagcattccggggacagctctaacgccagaagtcataccttcaatgcatttctcggggctccactcgcttgtcctcaccacattgagtaaacccagaaagacagaggacatctctcctagatgcgtgtgtgaaatctgccagattctaaatgcctgggacattccaaaaagtgactttaagagcattggccgggcacagtggctcacacctgtaatcccaaccctttgggaggctgaggtgggaggacagactgagccctggagttcaagaccatcctgggcaacatgggtagaccccggctctaaccccgaacatggtggcacgtgcctgcagtcccagatactcagaaggctgaggtgggaggatcgcttaagcccaggaggttgaggctgcagtgagctgtgaccatgccactgcactccagcctgagtgacagcgagagactttgcctcaaacacacacacacagagtcaggggacggtggcttacacctgtaatcccagcactttgggaggccaaggtgagtggattggccaggagttcaagaccagcctgggcaacatggcaaaatcccatctctacaaaaattagccaggtatggtggcacccaccaacttgagaggctgaggtagaaggattgcttgaacccagaggcagaggttgcagtgagctgtgattcagccactgcactccagcctgggcgacagagggagactgtctcaaaaaacaaaaagaaaaaaaaagagtgtgagaggta[138 bp omitted]gcctcagcctcccaagtagctgggactacaggcgcccgccaccacgcccggataattttttatatttttagtagagatggg[131 bp omitted]tcagaccttcacataagccagacttttactttatagaaagggaaactgtggcccagggatggaagagactgacttggtgaatcgataggtctgggattccatgattcaccataaccaaccgaccaaatctgtcagcattcttgggacaaccagcatcgtgtgcctcctgatatcatgtacagagaaggacacagcatcacttctgtaacactcctgccaccagaatctaatcacaaggaaacatcacacaaacccaaatcaaggagaccttctccaaaagaactagcctataatcttcaaaaatgtcaattccatgaaaaacaaagaaaggccaaggaaccgtaccagactgaaggaaaccgaagagatgaaaactttttgctatgacagatagtttggggacagctggcaatttgcatacaggctgcactgttggatactactgtcactgagaaatgtacactgctcctctgtactgtggtggtgtaagagaacgtccttacacttggaaatgcaactgaagcatttagaggcaaagggacgtaatgtctgaaactattcttgcaacttctctgtaactttaaaataatttcaaaagaaaaacaaatgatttcaaag[137 bp omitted]actccgtctctactaaaaatacaaaaaattagccaggtgtggtgagatgcgcctgtaataccagctactcgggagcgtgaggcacga[134 bp omitted]gtgtttccgagtatctctaagtctgtgcatgcatttgtggtcagagtctggggagctgggggcgtgaatgggctgcttcagacactgctttgagggtgtgaccaggacctgagggtgtggttaaggtgtaggggtggggctaggcccttgggggtgggaccacagtcccagaggcgtggccagggcctcgaaggtatggccatagtttgaggcgtggccgagaaactccgttcccaagggaggtggtaactctgtgctcagagcgccctcttgtggctatcctcaggtctccactttttattcaatagctttatttcgttttatttttttcaactttcattttagattcagggagtacatgtgcaggcttgttacctgggtatattgcatgatgctgaggtttggggtacgactgatcccgtcacccaggtactgagcatagtacccaacagtttttcaacccttgccccctcccttcttccctccccactttagcagtccccagtttctattgttgccatctttatgtccctgagtactcaacgtttagctcccacttacaagtaagaatgagcggtatttggctttttcatccagcctaactgttttattgagatataatgtgtataccatacaatttacctctttaaagtgtacaattctggccgggcgcagtggctcatgcctgtaatcccaccactttgggaggccgaggtgggagaattacttgaactcaggagttcaagaccagcctgggcaacacagagagacctcgtctctataaaaataaaaataaaattttaaaaagtgtacaattcagtgactttagtatattcacaaaatagtgcaattatcaccagacttttttttttttttttttttttgagatggagtctagctctgtcgcccaggctggagtgcaatggttcagtctcagctcactgcaacctctgcctcccaggttcatgccattctcctgtctcagcctcccgagtagctaggattacaggtgcatgccgccatgcccggctaattttttatactttagtagagacagggtttcactgtgttg[134 bp omitted]aaacctcatacccattagtagtcactccctatttcccctcaacacccttccagctctagacaacccataacatactctcccttttttgtatttttggacataacatagttgtacatattgtgggggtacatgtgatgttttgatacatgtatacaatgtgcaatgatgaaatcagggtaactgggatatccatcacctcgtttatcttttctttgtgtttagaacatcacaattattctct[132 bp omitted]cctccagactagctgggactacaggcgcccgccaccaggcccggctaattttttgtatatttagtagagacgtgggtaacacggtaagacgtagtaacacggggtttcaccg[133 bp omitted]gctctgtcacccaagttggagtgcaacggcactatctcagctcactgaaacctccacctcccgggatcaagagattctcctgccttagcctcccgagtagctgggattacaggcgcatctcactgcggctggctaatttttgttttttagtagagagggggttttaccatgttgcccaggctggtctcgaactcctgacctcaggtgatctgcctgccctggcctcccaaagtgctgggattacagctgtgatctgcccaggctggccagtgactggcttctttcacttagcattatgttttttttgagatacttcattcctattagcagggagtgacatgcacctgtggtcccagctactcaggaggctgaggcaggaggattgcttgagcccggaagatcgaagatgcagtgagctgagattgtgccactgcgctccactctgggagacagcacaagaccctatctcaaaacaaacaaacaaacaaaaaatcattccttttaatggccaaagaattttccgttgtatgagcagaccacattttgattatccattcttcaactgatggacatttaggttgtttccacaagtctttgggtagatatatgcttccaattctctgggatatatatatacgtaggaatgctctagccctgtgtttaacattttggggagctgccaaactgttttccaaagcagctgcaccattttacattcccaccaacagcgtagagggttccaattatttctccatatccttgccaacacttgtgattgtctgtcttgtttatgacagtcatcgtagtgggtgtgaagcagcattcactgtggttttgatgttcatttccttagtggatcacattgtggagcatcttttcatgtcattcacttcatttgtatccactttgagtcaaatctggaaaaagagttattatagttgcaaagtggatacaaaaaaacctgtcaaatctaggaaaagagttcatatagttgcagattttttttcttttttagacaagatctcactgggtcatccaggctggagtacagcaacacaatcatagctcactgaagcctcaaactcctgggctccagcaatcctcccacctcagcctcccgagtagctgggaccacaggcagcatcccagcatgcccagtttttttttgttgttgttgttctttgtttttgtctttttcagacggagtctcgcgctgtcgcccaggctggagtgcagtggcatgatcttggctcactgcagcctccgactcctgggttcaagcgattctcctgcctcagcttcctgagtagctacgattacaggtgcgtgccaccatacccagctaagttttgtatttttcatagagatggggtttcaccatgttggtcaggctggtctcgaactcctgagctcatgatccgcctgccttggcctcccaaagtgctgggattacatgcgtgagccactgcacccaaccatttttggttttttggttttgctttgttttgtttttgtttttgtttgtagagacagggccttgctatgttgccaggttggtctcaaactcctggcttcaaccgatcctcccacatcagcctcccaaagtgacaggattacaggcgtgagcaccacccctcttccagcttgtggtgttcactggtaatctttggtgttgtttggcttatagatgcatcactccaatctctctgccgccatcgtcatatgttgtgtgtgtgtgtgtgtgtgtgtgtgtgtgtgtgtgcacctgtaactgtatccaaatttccttttcataaggatatcagtcagatttaggacccaccctaatccagtagaaacttatcctgatctgattacatttgcaaagaccttatttccatatagggtcacattcataaattccagtgaacatgaacttggtggggaggggaatgattcaacccaggccactcattattatgtgtttatgacacacactgttggtatttgtgtccagttcattcaccttaattgctgcgcaagagtttattgtgagagtacaccacaatttatgtcaggctgctggtggtgaacacccaccttgttgccaatttcctccacttccaacaagaatgcaattaacatccctgaacatgtctcttggagtttcttagggcagtatctttcaaacggccaaacaagatccattagtgggttgtgaaatcaatttagtgggttataaacaatttttcctttaatgaaatggaattaaatagaagctattagagtgcatgctcatagtcggagtgagagctcttctgtgaaacttttgcttcaggtgtctatagctgtattaatgtccagcaaaagtgtttacaagccacagctctgaaagaggtaactggacaaatgacctgtccatttgtccaaaggtctcgtggatgctgccaaattgctctgcaatgtagtttgtccatttgcactcagagcagctccttgccaatacttgccagtcaacactttgaactttttcaggctaatgggttttcatcctgttttgttttttgttttgttttgttttgttttgttttgttttttgagacagtctcgctctgtcgcccaggctgtagtgcagcagcatgatctcagctcactgcaacctcttccccccgccgggttcaagcgattctcctacctctgcctcacaagtaactgggattacaggcacaccactatgcccagctaatttttgtattattttaattatttatttatttatttttatttatttatttttgagatggagtctcactctgtcacccaggctggagtgcagtgctgcagtgttggctcactgcaacctctgcctcctggattcaagcgattctcccgcctcagcctcctgagtagctgggactgcaggcacgcaacaccatgcccagctaatttttgtattttgagaaagggggttttgccatgttggccaggctagtctccaacttctaacctcaagtgatccacccacctcagcctccaaaagtgctgggattacaggcatgagcaactgtgcccagcctaatttttgtatttttagcagagatagggtttcaccatgttggccaggctggtctcaaactcctgaactcaagtgatccacccgccttggcctcctaaagtgctgggattacaggctacaggcatgagccaccacacccggcccaatctatttatttattttatttttttatttattttctttttggtcgttttttaatttaaagaaaaattttaagattttcaattcctacgagatgggggtggggctaaggaggggctcagggtgcattgggaggttcggctctcatcctatgccccctacccgccgacctcaaaggacttttgagaattcagtgtgccaatgtttgcaaagcattacacacagggcctgatagacagcaagcattcaataaatgctagctatggccgggtgtagtggctcatgcctgtaatcccagcattgtgggaggcccaggctggaggattgcctgagctcagaagttcaagaccagcctgtgtaacacagtgagacatcatctctactaaaaactaaaaaaaaaaaaaaaaaatagccaacgtggcagtgcatgcctgtagtcctagttactagggaggctgagacaggaggaccacttgagccccagaggtcaaggctgcaatgagtggtgatccaacaaccactgcactccagcctaggagacagagcaagaccctgtctcaaaaaaataaaataaaataaaataaaagttagttattactattattctctgattcaaagttctctagatatgtgcacatttgcgatcagaacttggcctggtctgaccaggcatggtggctcacgcctgtaatcccacctctttaggaggccgagcaggcaggattgattgagcccaggagatccaggctgcagtgagctatgatcaggccactgcactccagcctaagcaacagagcaagaccaagcaagaccctgtatcacaggaaaaaaaaaaaaaaaaaaagaacttggcttggcctaggatggggcgcggccagaatgccttgcttaggggcgaggcccacagcgccccgatggctgcccagcgagcaactgagcaaccaggctgatgttacaggttctacaggttgggtgaaagccacgcccggccacccctacacaaatgagttgctccccgcccccacagtcttgaacgccatcctcccgcctggcttcttcgggactcaggagtatcttaactctggcctgatttctcccatgccacaccattaggggcacccagaaatcttgttgccaaattcctgccccctcagacacccactttcaaacccttgcttctagggaacccaagggcctggtggctctgtgcctccttcctcggagacagagagagagcaatgcctccctgaccggttcctccttgaaatctcagttatctgacctttaatcccatgccacgaccaaagacccataccttcgacaaggcgctgtgtccaagtcccacctctcggtagctcccagcccttcccctcccctctccaagaagagtcccgtggcagggcaaaatggctcacgcctgtaatcccagcactttaggaggccgaggcggatgcatcgcttgagctcagaagttcaagaccagcctgggcaacatggtgagaccccgtctctactaaaaatacaaaaaataaaataaaataaaatagccaggactgctgatgcgcgcctgtgaccccagctactcaggagggtgaggtgggaggatcacttgagcctgggagacagaggttgcagtgagctaagatctcaccactgcactccagcctgggtgaaaaagcaagaccctgtctcaaaaaaaaaaagtcccaggcctcccctagccccttgcccctctctgaagggacccagatatcctacctgcacttcccacccacacactgagaagccccctcctaccgctacccaccaaagccaccccaccctgctcctttttgagaatcaaactcaaaccgcaccagctaatttttttttcttttttgtatttttagtagagacacggtttcaccatgttggccaggctggtctcgaactcctgacctcaggtgatccgcctgcctcggcctcctaaagtgctgggattacagttgtgagtcatcgcgcccagccacattttattttatttttaaaaattttttagagatagggcctcactatgttgcccaggctggttttgaactcctgggctcaggtgatccttccacctcggccacccaaagtgctgggattacaagcatgagccaccgctcccggcctccaaatcccacctcttgaagacccacgtgccaggtcctccagcccccgccccctttggagacactggtacctgcaggcccctccccggttctctaggacccgccctctcctttcactctgggcgaggccgcccctatcccagccgcaccggtccttcccggcacacgcgaggctcccatggctctggcggtggccccgtgggggcgacagtgggaagaggcccgcgccctgggccgggcagtcaggatgctgcagcgcctagaagagcaatgcgtcgacccccggctgtccgtgagtcccccttcgctgcgggacctgctgccccgcacagcgcagctgcttcgagaggtggcccattctcggcgggcggccggcggaggcggccccgggggtcccggcggctctggggactttctactcatctacctggccaatctggaggccaagagcaggcaggtggccgcgctgctgcctccccggggccgaaggagtgccaacgacgagctcttccgggcgggctccagactcaggtgagccttcgccccagaacaaagtcctctggggtgaggcccaggtcttgctcccagcccctcctcccccagacccaggaacttaggcccccaccccctcctccctcagacccaggaactcaggcccccaccacctcctccctcagactcagggctccagcccccagcccctcctccctcagacccaggggtccaggccccagcccctcctccctcagacccaggaactcaggcccccaccccctcctccctcagactcagggctccagcccccagcccctcctccctcagacccaggggtccaggccccagcccctcctccctcagacccaggaactcaggcccccaccccctcctccctcagactcagggctccagcccccagcccctcctccctcagacccaggggtccaggccccagcccctcctccctcagacccaggaactcaggcccccatcccctcctccctcagactcaggggtccaggcccccagcccctcctccctcagacccaggggtccaggccccagcccctcctccctcagacccagaaactcaggcccccatcccctcctccctcagacccagggatccaggccccagcccctcctccctcagacccaggggtccaggccccagcccctccttcctaagggaacctggaaaatgggccacccagttttctccttccttgggcacccatgccctcagcccgattttgccatttccttggtcacccagcagcccaattctggttcccactatcccactatctcagaattcagggaccccatggggtttcctacactgaggataaaataaaagttagctattactattattctctgattcaaagttttctagatgtgtgcacatttgtgatcagaacttggcctggtctggctgggtacggtggctcacacctgtaatcccagctctttgggaggcccagctgggaggatcaggcctcagaatgtggagaccccatgggctcctaggtggaggagaggtagatggacacacccaaagaaactgatcattaggcccccatcacggtttctgcctggactacccacttggtctttagttcctgaggaacagctggctccagacccaggacctgcctggaggccacccctctgctgttctgcactgaggaaggaatctcagagtgaccaggcagatgaggtttggggcccagagcccagaacaaggtctagttcagggacccatgccacttctttatattaaatattttgtagtgtctctttttttttttttttggacacaaggtctggccctgtcgcccagactggagggcagtggcaccatcatgactcactgcagcctccaactcctgggctcaagtgatcctcccacctcagcctcccatgtagctgggaccacaggcgtgcaccaccatgccagactaatctttttattttttggtagagaggaggtcttgctatgttggctaggccggtctcaaactcctggcctcatgcgatcttcgtacctcagcctcccaaagtgctgagattataggtgagagccaccatgtccagccaagtgtttccttaattcatcctgagaggacatgcagaggttcaacaacctacccacctatagttttttaatcactataatgcccaaattataagagagtgatcaaaggaatttttttcataaatattatctatgttttaaatgaaaatgccaaggcacaattattcttggaaggcagagctgactagtcagacactcgtacctgtaggtagaaccactgtcatacagaatcaaatagtcttcccttaatatataggagagctggatttctgcaaaattcagcgtaatttttttttttttttagacatggtctcactctgttgcccaggctggagtgcagtggcgcaattttgactcactgcagcctctgcctcccatgttcaagcaattctcctgcctcagcctcccaagtagctgggattacaggcacccgccaccacgcagcgataatttttatagtttttattagagacagggtttcaccatgttggccaggctgttctcaaactcctgacctcaagtgatccacccacctcagcctcccagagtgctgggattacaggcatgagccactgcttctggccaaaatctaataaaagccatgtatatcgtttttaatttttttttttttttttttttgagatggagtcttattctgtcatccaggctggagtgcagtggcgtgatctcagctcactgctacctctgcctcccgggctccagcgattctcctgcctcagcctcctgagtagctgggattataggcgggcgccaccacgccaggctaatttttgtattttcagtacagacagggtttcaccatg[137 bp omitted]agccttatccctgcaggtgttccccatgaggggaggaagagggtgtcagtgggagccccaaggatagccagagtccttgcccatccccacaggcgacagctggccaagctggccatcatcttcagccacatgcacgcagagctgcacgcactcttccccgggggaaagtactgtggacacatgtaccagctcaccaaggcccccgcccacaccttctggagggaaagttgcggagcccggtgagtaagcccttgtcctcagctcccggagccccatcctgccctggcccagggacccaggggtccaggcccacagctgcttctttcctggagaccctcccatcataggctctgggaggcctcagcggtgtctcccccacccctctcccacccaggtgtgtgctgccctgggctgagtttgagtccctcctgggcacctgccaccctgtggaaccaggctgcacagccctggccttgcgcaccaccattgacctcacctgcagcgggcacgtgtccatcttcgagttcgacgtcttcaccaggctctttcaggtcagggaaggccaaggctgggagctagacttgggtccaggaggaagtagagggctgaatcctggattcctgggtctgagggaggaagggccgggacctggactcctggatctgagggaggaggggccggggcctggactcctgggtctgagggaggagggggctgggacctggactcctgggtctgagggaggaggggctgggggcctggactcctgggtctgagggaggagggggctggggacctggactcctgggtctgagggaggaggggccggggacctggactcctgggtctgagggaggaaggcctggggcctggactcctgggtctgagggaggagggcctggggcctggactcctgggtctgagggaggagggcctggggcctggactcctgggtctgagggaggagggggctggagacctggactccagggtctgagggaggagggggtgagggcccggactccagggtttgagggaggagagggcggggggcctggactcttgggtctgagggaggagggcctggggcctggattcctgggtctgagggaggagggcctggggcctggactcctgggtctgagggaggaggggctggggcctggactcctgggtctgagggaggaggggctggagacctggactccagggtctgagggaggaggggctggagacctggactcctgggtctgagggaggaggggctggagacctggactccagggtctgagggaggagggggtgagggcctggactccagggtttgagggaggggagggctgggggcctggactcttgggtctgagggaggaggaagctagggtcccaaactcctgagttctggagaaagaagagcttggggtcttgtaaaagggatatgcctgaggcccaccatgggtgtgaaggaggtggttggatcctcgagccctagggactacttagggatgtgagctgcttccctggtcgctccctgacccaagccctgccccaccccagccatggccaacactcctcaagaactggcagctcctggcagtcaaccacccaggctacatggccttcctcacctatgatgaggtccaagagcgtctgcaggcctgcagggacaagccaggcaggtaaagggtccagggctcagcagaacaaggctgcagggctcagggatctgggctctgggctggtgcgtggtggagcccagatgtccttccaagagtgggaacagaggtacccaggaccccagagagttgataactcagaggcaggacactgagtgcccctcccagcccgcctcttctctcgaggcctcctgtactgtcccataatcctgcagctaagggacagtgcccgctctagcaaggagcccaaagacccgcttgagggtaaggtccgtttctggtaggtcagagtcatgttgtaccatctgttcagtattttgagtatgaatttcccacctgttggcataggagactgaaaaacaagacatgagagtccttaaattatttcaaccaggagttttgagctgttgggtccccctagagggctgagaattgagctgtctagataccaagagaagagaaggtcaggtttgtgagtctctgcagggctgaggtgcaggggtaggacggtgagtgcgttagcattcttccagttacacttcaaacttatttaagggaaaagaaaaaggaaagaataaattcctataattgaaaaggccaggccccgcacagtggctcacacctgtaatcccagtactttgggaggccgaggcgggcaaatcacttgaggtcaggagttcgagaccagcctggccaacatggtgaaacctcatctctactaaaaatacaaaaattaggcctggcgcagtggctcacgcctgtaattccagcattttgggaggccgaggtgggtggatcacctgaggtcaggagttcaagaccagcctggccaacatagtgaaaccccatctctactaaaaataccaaaaatttagccaagcgtggtggcgtgcacctgtaatcccagctacttgggaggctgagacaggagaatcacttgaacccaggaagtggaggttgcagtgagccaagatcacgccattgcactcctgcctgggcaacaagagtgaaactccatctcaaaaaaaaaaaaaatacaaaaattagcctggcatggtgatgcgtgcctatagtcccagctacttgggaggttgaggcacaagaatcacttgaactcgaaaggtggaggttgcagtgagccaggatcccgccactgcactccagcctgggcaacagagcaagactctgtctcaaaaacaaaaaggaagaaaagaaaagaagcctagggtgtgggtttcaggcacagctagatccaggtgctcaatggctactgtcaggaatcagttcctgttcatcccctttctctgctttcctctgtttgcttcattctcaaacatggtttctcctcattgtggcaaatgacttctagaagtcccagctgtgtaccctaccttcttagcaacctctgtaagaaagggggcaccttgctctgacacttgcagcgaaagtcccagaacggactcccatcactgtggtcaggggtcctgaaatgcactgattggccaccccagccttgtttaaactccagtgaagcgaggagagatctccaaatggaatcagggctgtttttatcataaaagagccaagcaggcaaaaacagcatatatcccctagagaggcaggcaggggtctagcacatgccgttgcctagaggatgggaagctgggggtgaggacctagacacctggattcccaacaggccaggggactggaagttcacaaaagggatggcagtgaccactccctcaccccatcctacctacctctccctccagttacatcttccggcccagctgtactcgcctggggcagtgggccatcggctatgtgagctcagatggcagcatcctgcagaccatccctgccaacaaacccctgtcccaggtgctcctggagggacagaaggacggcttgtgagtctccattctggtaggaggagggtgtcagcaaaatctggttggaaagatcttgcatgttgtgcactgccggtggccaccacgtttgagggtgcaaccattcacataggggacatctcaaatctgcagtactacaaaattccagcaggtggcagtcaaaggtcttgaggaaggggcgcctctgagggtcgcacaaagtggccatagatcgggcccagccacagctccgaggagaagtgtgtggggcattgggcacaaccgcaagggctccattccttggaactgagctcaagagcgtttgcttctattttcttcctcttttactttagttaatttttaaaaaatgagatggggtttcgccatgctgcccaggctggtctggagctcctgggctcaagcgatcttcctgcctcggcctcccaaagtgttgaaatgacaggcgtgagccaccgtgcccagccagcttttgtttctagatatgagatcctgctctagaatctagattgatgg[137 bp omitted]acctctgcctcccagattcaagcgattctcctgcctcagccgcctgagtaggtgggattacaggcacccaccaccacacccggctaattttttgtgtgtgtttttagtagagacagggtttcaccatgttggtcaggctggtctcgaactcctgacctcatgatccacccacctcggcctcccaaaatgctgattacaggcatgagccaccatgcccggtcctaagttttggatttttaatagagatggggttttgccatgccaggctggtctcaaactcctgacctccagtgatcttcccttctcgaactcccaaagtgctgggattacaggtgtgagccactgtgcccggccaggaagacaggtttcttttcagagtttcacctttagccagaattttcttatcagtcatatctatatgactactgacatacaagagaggagataggaaggtaggtagctagctagatagtcagataggtagatagatagatagatagatagatagatagatagatagataggcagataggtagatatgctgttgattatttgcaataattattat[132 bp omitted]atggtgaaaccccatctctactaaaaattaaaaaaaattagctgggtgcagtggcgtgcacctgtaatcccaactactccagaggcagaggcagaattgcttgaacctggcaggtggaggtttcggtgagctgatatcacgccactgcactccagcctgggtgacagagcgagactccatctgaaaaaaacaaaacaaaaaaattttattgtatatttggtagagatgggggtggggtgtggctcaccatgttgcctaggctggtctcgaactcctgaactcaagcaatctgcccgcctcaccctcccacagtgctcagattacaggtgtgaaccacacgcctggccaatttatagtaattatcttctataaaatcaccacacaccctgaattattgaatatcaagccgttgctcccaggggaaatacattcttgggtcctgagtagctaggactacaggtgcacgccaccacgcccggctgggtcaccacatttttgtcaaccagtcacaacatagtaacctttatgtatgttttcgtttaaagacactttattcaaggccgggcgcagtggctcacacctgtaatcccagcactttggaacaccgagtcgcgcagaacacgaggtcaggagatcgagaccatcctgcctaacactgtgaaaccccgtctctactaaaaacacacaaaaaaaattagccgggcgtggtggcgggcacctgtagtcccagctactcaggaggctgaggcaggagaatggcgtgaaccctggaggcggaggttgcagtgagccgagatcgtgccactgcactccagcctgagcgacagagcaagactccgtctcagaaaaaaaaaaaagaaaaaaagaaaaaaaaattgacactttattcagtacctattgttggttcgctaacattgaactcacaaccaacagcagtataacttgtgtctcagcaaagcttatacaacacacacgttttctccataagacacatcacagccttctttcacttaggaacaggagacaacacttcagctactcttggggaccatttaaaacagaaaaatcagaggccgggcatggtggctcatgcctgtaatcccagcactttgggagactgaggcaggcagatcacttgagatcaggagttcgagaccagcctggccaacatggtgaaacctggtatctagccaggcatggtggtgtatgcctataatcccagctactcaggaggctgagacgagaattgcttgaacccgggaggttgaggctgcagtgagccaagatcacgcctctgcattccagcttgggtgacagagtgagattccatctcaaaaacataaaaataaagtcaatcataagctgggcgcagtggctcacgcctgtaatcccagcactttaagaggctgaggtgggtggatcaccaggccaggagatcgagaccatcttggctaacacggtgaaaccctgtctctactgaaaataacaaaaaattagctgggcgcagtggcgggcgtctgtagtcccagctactcaggaggctgaggcaggagaatggcgtgaactcgggaggtggagcttgcagtgagccgagatcgcgccactgtacttcagcctgggtgacagaaccagactctgtctcaaaaaataaaaataaaaataaaataaagtcaatcgtagaagtcccttcttattgggtgtttatgcacagaggaggacgctgcatttaaaatttttttctaatttaaaaaattta[210 bp omitted]gaggcaagagaattgcttgaacccgagaggcagaggttgcagtgagccgagatcacgccattgccctccagcctagggcacaagagtgagacttcatctcaaaaaaaaaaaaaaaaaatttattcgccaagcatggtggctcatgcctgaaatcctagaactttgtgggaggatcacttgagcccaagagtttgagaccaacctggacaacatagtgagcccccatctcaataaagagaaaaaaagaaaaaaaaaattagttaccgacaaggtatcactatgttgtccaggctggcctcaaactgctgggctcaagcgaccctccctcttcggcctcccaaagtgctggggttacaggtgtaaaccactgcacctggccagcgcttcatgtttcttttggtggttctttttttttctgtgacagggtctcactgtcacccaggctggagtgcagtgacatgaacacggctcactgctgcagcctcgacctcccaggctcaggggattctctcgcttcagcctctcctgagtagctgagaccacacgcacatgccaccatgcccagctaatttttttaatttttttttttttagacatagtgtctttctgtgttgcccaggctggtctcgaacccctgggctcaagcaatcctcccgcctcagcctctcagagtgctgggattcaggcatgagccactgctcccagccagggctgcatgttttataagcactgtctttcttatttatttatttttaaaatttcttttttttttttttttttgagacagagtcttgctgtgttgcccaggctcgagtgcagtggtgcgatatccattcactacaatctctgcctcctgggttcatgaaattctcctgcctcagcctcccaagtagctgtgattacagacacgcacctccatgcctggctaattattattgtatttatttatttattttgctatttttagtagaaacggggtttcaccatgttggccaggctggtctcaaactcctggcctcaaatgatctgcctgccttggcctcccaaagttctgggattacaggtgtgagccactgtacccggccagcactgtcttatttaatccatcacaaatctttgcctcaggcatgatcatgtccatgttacagaaggggaaactgaggccagaaaggtcgagtggccccagccaggtcacacagtgtgttagtgagagagccactgtggggcccaggtcagggatcctgcactgctccacatgacaggccaggcagggccactagcctcagggagtctgagggtccaatatttcatgtgctatacatgtcggaataactggagtagcattgaggcatgccagataggccgaggaaatgatccagggggagacccagggagcccagagcttgcttctccggtgtcctggagcccagtgctgagatctcgcctacaaccctggttctcggtctctctggtccttgctgtgtgaccttgggcaaatgcctttcccaccctgagccttgggtcactgtctgtgagggaagaagtggtacaggtgctctcagaggatctttccatcctgatattatcagattctaggatttgatcactttcatgatctgtgacactaaaatctgttatgcttgggcgtggagaagggtgaggttctagaagagctaagccagagattttcccttttttttttttgagacagagtctcactctgttgcccaggctgcagtgcaatggcatgatcttggctcactgcaacctctgcctcctggattcaagcaattctcctgactcagcctcctgagtagcatgcaccaccacgcccagctaatttttatattttcagtagagacggggttcca[134 bp omitted]cttagtctatctcatccttgtttctggagcttgagtcactgaggttttgtgtgccctaccttgggagtctgaggggacatagccctgccctggggtatctgagaagacacagtcccaattagaggtgggtggagggaaaataagcccaggccagcaatggatttgggacagatcctcaactcagggaaatatggggccctgtagggggtaaaggtacttgttcatctgggggtgggaaatactggatggccccccagtccccctctcttcccttcccccagctacctctacccagatggaaagacccacaacccagacctgactgagctcggccaggcagaaccccagcagcgcatccacgtgtcagaggtgagacccgcacctgcacccgcagtcccagttccctgaccctgccacccccacgttgccttggctcagaggcctggggttggaatgttggcttggtggctctgtgaccttgggtaaatcacttgacctctctgaggctcagttattcttccggaaaatacggctcctcctgcctctttcccaggggtgatcacggggattaaataaggaactgatgctgctgagatcatcaggacagctaatgcattcgagcatttgccagcaatagccccgtgccagctcctaatcttcacagccaccctacgagtgagaaaaacaacaataacaaataaataatttattttttatttatttttatttttagagacagaatctcttctgtcgcccaggctggagtgcagtggtgcgatcatggctcactgcagcctcgacctctgggctcaagcaggcctcccacctcagcctcccgagcagccaggagtacaggtgtgagccactgcacccagctaatttttgtatttctctgtagagatggggtttcgccatgttgcccaagctggttttgaactcctaggttccagcaatcctcccgcctccacctcccaaagtgctgggattatagccatgagccactgtatctggccctaaattttttttagtataaatatatcccgtgcaatatttgggacatccttatacttcaaattgtattcacggtttacatgaaattcaaatttggaggccgggtgccaccgcacccataatcccagcactttggtaggccgaggccggcagatcacctgaggtcaggagttcaagaccagcctggccaacatagtgaaacccatctctaccaaaaatacaaaaattagctgggtgtggtggctcacacctgtagtcccagctgaggcacttgagttgggaggctgaggcacgagaatcacttgaacccaggaggcggaggttgcagtgagctgagatcacaccattgcactccagcctgggcaacagagtgagacttggtctcaagaaagaaaaaaaaaaagaaagaaagaaattcaaatttaggttaggcacagtggttcatgcctgtaatcctagtactttgggaggctgaggcgggtggatcacttgagcctgggagttggcggttgcagtaggccaagattgcgaccctgcacttcaacctgggtaacggagtggggctctgtcccgcaaaaaaaaaaaaaaagaaagaaagaaaaataatgaaattcaaatttagcagcatcagcatccaatacttttatttgctaaatctggcaccactgggtgtagacaactggggagaagaagtctcataacaaggagtgaagacatggccgggcgaggtggctcacgcctgtaattccagcactttgggaggccaaggcgggcagattacttgaggtcaggagttcgagactagcatggccaacatggtgaaaccccatctctactaaacatacaaaaattagccaggtatggtggcttatgcctgtagtcccagctactcaggaggctgaggcacaagaatcgcttgaacctggaggcaaaggttgcagtgagccaagatcgcgccactgcactccagcctgggcaacagagcaagactgcgtctccaaaaaaaaaaaaaaaaaatgagtgtagacatgtaggaggccattggacatgccagccttggacttaggagagggttcagttctggcacagaggtttggtttattattttttttttaaatagagacggggtcttactatgctgcccacgctggtccagaactcctgggctcaagcattccacctgccttggccgccagaagtgctgggattacaggcatgagccacagcgccaagatagaggaggtgtgggattttctttctttcttttttttttttttgagacggagttttgctcttgttacccaggctggagtgcaatggtgcaatctcagctcactgtaacctccatctcccgggttcaagcgattctcctgcctc[222 bp omitted]cgtggctgacgcatgcccctcgctgtcttctctatcctctcacctgccaggagcagctgcagctctactgggccatggactccacatttgagctctgcaagatctgtgctgagagcaacaaggatgtgaagattgagccgtgcgggcacctgctctgcagctgctgcctggctgcctggcaggtgggtctgacccctgtggcgccttcccctctggtctccccctctctacagggaaagccccaaaaggatctccatgcctcattgatcatatggggaaaccgaaggccagagagggcaaagagctgatggcaaccactcaggagcccggctgtctttcccagggcctctggttccatcccactctgcacacgctgcctctgtttctccctctccggcaatgttatcagtggaaagctctccttccttctctgcctaggtgatccccagccagtggcttcacgtctctgagccttagcctcgtcccctggagaacggggctgagaatagtgacctcccaaaggccacagtgaggctgggcacggtggctcacgcctgtaatctcagcactttgggaggccggggtgggtggatcacttgaggtcaggagttcgagaccagcctggccaacatggtgaaaacccgtgtctactaaaaaaaaaatacaaaaattagacgggtgtggtggtaggggcctgtaatcccagctgctcgggaggctgaggcatgagaatcacttgaacctgggaggcagaggttgcagtgagcagagatcgtgccgctgcactccagcttgggtgacagagcgagactccgtttttttaaaaaacaacaacagcaagggccacctgagggtctgagcctggaaaggcctggcccggaagctgtggccacagctccatggggatccctggcctgtgtgccccctcctgacctcggctctggttccgttcctctctcaccttccctcccagcatttccctccacattcctctgctctccacgactcttctctccttccgtctcccttcctctgtctgtcttccccacatcaatcttttgggcggggagctcctcgttggcccaagggacaggatggagagcaggggagcactgaccctttccctcccgacctcccccagcactcggacagccagacctgccccttctgccgctgcgagatcaagggctgggaggccgtgagtatctaccagttccacggtcaggctactgctgaggactcagggaacagcagtgaccaggaaggcagggagttggagctggggcaggtgagcagggccagccgggagctggaatccaaattcctgaggcctgagtggggagggactggagcctggactcctgggtctgagggaggagagactgggggcctggactcctgggtctgagggaagaggggttggagcctgtactctgagtctaagggaggagggctgggggtcctggactcctgggtctgagggaggaggggctaggggcctggactcctgggtctgatggaggtgggtatggggacctggactcctgggtctgagggaggagaatatgggggcccggactcctgggtctgagggaggaagagctgagggcccacactcctgggttctaggagaggagggggctgataacaagattctcaggtcctagggaactggtcttttgcttccccaagggctggggctgtggctttccctggctgtaaccctcctaagtgttcatacgttgtcttggtctctgttatatcttgagtctagaacagtgcctgaatgctgagtcccaggcaggagaacatggaggcgagaagaaaatggcagctcacaagccccttctccttcctctgtcccaccccaggtgcccctttcggctcctccattgcccccacggccagatctgccccccaggaagcccagaaatgcccagccgaaagtggtgagtcaggcgctggtctgaggttgggggctggggtctcactcacctccagggtccctggttcacctgtgcactcaggggtgccagggcagggactcatccttggcacccatttccaaggcacccatcccctctgtgacctcttcccttgttttcattccccctctgggactttctttttttttttttttttttttttttgagacggaatcttgttctgtcgctcaggctggagtgcagtggcgcaatcttggctcactgcaacctccacctcccgggttcaagaaattctcctgcctcagcctcctgagtagctgggattacaggcacccaccaccatgccccgctaatttttgtatttttagtacagacagaatttcaccatgttgatcaggctggtctagaactcctgacttcattatctgcccccctcagcctcccacagtgcggggattacaggagtgagccactgcgcctggcctcaaggactttctagctctccttccagcatcccagatgtgtcctacctcggggcctttgcataagctgttcccttggcctgcacagtctttcctgaggcttgctttcccatcccttttcagggaggccttccctgaccactctgttcaagatagcacccctagctggggtggtggctcatgcctgcaatcccagtactttttttttttttttttgagaggagtctcactctgtagcccaggctgcagtgcagtggcataatctcggctcacagcaacctctgcctcccagattcaagcaatgctcctgcttcagcctcctaagtagctgggactacaggcacccaccaccatgcccgactaatttttggatttttagtagagacgaggttttgccacattggccaggctggtctcaaacccctgccctcagctgatccaccgccttggcctcccaaagtgctgggattacaggcatgagccaccatgcccggcctgcaatcccaacactttgggaggccaaggcaggaggacggcttgagcccaggcatttgagaccagcctgggcaacatcacaagaccccaacactacaaaaaaattttaaaattagcccaaagtggtggcgcacacccgtagtcccagctgctcaggaggctgaggtgggagggtcccttgatcccaggagttggtagctccagtgaggcgtgatcacaccactgcactccagcctgggcaacagaatgagaccctgtctctaaaccaataaaaaaaaagagtctgtaatcccagctgttagggaggcagaggcaggaggaaagcttgagcccaggattttgagacctttctgggcaatatagcggaaccccgttctctaaaaaaaaaaagaaaagatgaaaatagcaccgctgtccctcggggccctgctctgctgtatgttcaaagatctttcgccacccggcagagcttagggttggttttgtcggcttttatcactgtcaggttgcaaccttcctgcaggtcaggcctttgttgtcttctccgtcatatctccagagtgcagaacagtgcctagcacacatacacgtcataggtgctcaataaatagatgccaaatgaatacactgaagtgagtcttcccaacagccctatgaagtcaaaagtgttcctctcccggctgggcgcggtggcttatgcctgtaatcccaacattttgggaaggtgaggcaggtggatcactgagttcaggagttcgagaccagcctaaccaacatggtgaaaccctgtctctactaaaaatgcaaaaattagctgggcgtggtggcgcacacctgtaatcccagctacttggaagactgtggcaggagaatcgcttgaacccgggaggtggaggttgcagtgagccaagatcgcgccactgcactccagcctggatgacagagggtgagaccctgtctcaaaaaacaaacaaacaaatgaatgttcctctccccattttccagaggaaaaaagttcagagaggtgacagtacctgcccaaaaccacacagcctgaaagaggagaagtcagcgttggagtctttaaggcccccaaaccatctacttatttttttgttgtttctttgtttgtttgtttttcttttgagatggagtttcactcttgttgcccaggctggagtgaaatattatgatctcagctcactgcaacctccgcctctggggttcaagctaattctcctgcctcagcctcctgagtagctgggattacaggcaggtgccaccacgcctggcaaattttgtattttttagtagagatggggtttc[132 bp omitted]ctttcttttctccctacgctgccaccccaggatttttgggaccctggattgctggggagaagcagatctcttagtatctccggctgagtacacacaggcttcgatcaatactgagctgtcttcaaacaaacagctcaggaagtccgggaacattattcgaccacagcaaacaagagagccagcaggaagcggggcggtgggggggagggtggcggtgaaaccagccagggaagctaaaaacagatccaacctgccgccaaaagcaaatggaaacattaggaggcactcagccggctcccagaggacagtgatgggggacacagccaggacagcaggctgacagggacctcgggcctgatggtgacacctttgcctaggccataccctccgcctcccccaccctttcctcctctccccaaaccctgcctgattaaaattccagtccactcccacctagtctttcattcttcaaaacataccacagaagagacagccttgggtttgttacttctcagcaaggcactgtcataacttttgttgttgttgttgttgtttgagatggagtctcactttgtcacccaggctggagtgcagtggcacgatctcagcccattgcaacctccgcctgccaggttcaagcgattctcctgcctcagcctcccgagtagatggggtcacaggtgctcaccaccatgcctggctaatttttgtatttttagtagagacagggtttcatcatgttggccaggctggtcttgaactccttacctccggtcatctgcctgcctcggccttcttaagtgctgggactacaggagtgggccccgcctgtcataacttttgctatgtgcctggcattgctttttttttttttttaagatggggtctctgtctagcggagtgtggtggcgtgcacctgtaatcccagctactcaggaggctgaggcaggagaatcgcttgaacccaggaggcagaggttgcagtgagccaagatagcgccattgcactccagcctgggcgacagagcaagactccatctcaaaaaaaaaaaatagggtctctgtcagccaggctggagtgcagtggtacaatcacagctcactatagcctcaatcttctgggctcaagtgatcctccctccttagcccccagagtagctgggactacaggtgcctgtctccacacccgaatcatttttaaattttttgagcagtgaggctggggctgctgtggacactggatgtgatgggactgtgtcagtggtcagtgtcaccgtggttgtgatctgtgtatggtgctgtggcccctggggttgctgtctgcacgctgctgttctccatctgagaaacctccctttaggggacgacactgccattgagctggatctcatcaccccactgaccactgaggacctctctgaccctcagtgttttcatggggaaaatggggaccagcctgacacaagccccacaggctgggtttttttgtttgtttgtttgtttgttttaatgttttaatttaattagagacagagtctcaccgtgttgccgaagttggtctctaactcctgggctcaagtctcccaaagtgctgggattgctggcattagccacttcgtctagcctccccatgagttttgatgaagccagcaagctcagtcatctctaacctgagtcatatcccctccctcacctctcagaaatctccactggcagccaagcgcggtggctcacacgtgtaatctcagcactttgggaggccgaggtgggcaaatcctttgcttgaggtcaggagttcgagaccagcccggccaacatggtgaaaccccgtctctactaaaaaatacaaaaattagctaggcgtggtggcgggcacccgtaatcccagctactcgggaggctgaggtaggagaatcgcttgattctcgcttgattatcgcttccgccaggaggtggaagttgcagtgagccaagattgtgccactgcactctagcctgggcgacggtgcaaaaactccgtctcaaaaagaaagaaagaaagaaagaaatccccactggctccccagggctctaagaactcaagccaaagtcctctccgccgcccaaagacctggggctggggatctgactcttccccacctctctgatctcccctactccacctcctttccggcaacattggacccttgctgctcttctaacttgccagcaagcctccactcactcggagcctctgtctggatccttcttgcactcaggcatcagctgggtcattcccatctccaagaggcctccccggcatcttccctctcccaggcactttgaaggacatggaacttgctctgggacatttccttgttcaggagctgatcagtcactgcgagcctcgggttcagtggagcatcagctccaccaggacaaagatagttttctgtcttgttcacagctgtcttctcagagcgaaaaacagggccttggcctggcgcggtggctcatgcctgtaatcccagcactttgggaggctgaggcaggaggatggtttaagcccaggaggtcaaggctgcagtgagctatggtcccatcactgcactccagacgaggcaacagagcgagaccctgttttgctttgttttgttttgagacagtttcgctcttgttgcccaggctggagtgcagtggtgcaatcttggcttatggcaatccccacctcctgggttcaaacgattctcctgcctcagcctcccaagtagctggaattacaggaatgtgccaccacccctggctaatttcgtatttttcatagagacagggtttcaccatattggccaggctggtctcaaactcctgacctcaggtgatccacccacctcggcctcccaaagtgctgggattacgggtgtgagccaccgcgcgtggcccctgttttttcggtttgttgttgttgttgttgttgtttttaaaaaagaaagaaaagtaaagaaagagagagagaaagaaagggagagaaagaaggagggagagagaaaggaaagagagagaaatagaaaaagaaagaaagggagggagggaaagagaaaaaagaaagaaggaaggaaggagagagcgagagagaaagaagaaagaaagaaaagaaaagaaagaaaaagaagaaaaaagaaagagaaaaggaaaagagaataaaagaaagaaagggcctgacccactggagaggcttgggaactgtctgtggggcacacaagtgagcagaagggtggacacatggatggacaggcggacagacaaactgaaacttcatcctacacgagttagaggtgagagggaaaaggcagcatggactagggacaaggccaaaggtcctgtcagatggtggccgccaccactgtgtcacccctgtccagggcctgtgaaaggacgtccacccaggctgcagcctagcagagacatttcttcatctcctccccccaggcacttttggccctccccagacttcgggcccctcttctcttgccaagaattaaggctgtggcctcagccgcgcaggaagccacctccagcccccaggtggtctgggactcccaggtctaagacaaaggggacagggaagaggggcagagggaaagattggatgccgggaatcaaccgccctctcaaaatatctccattgcagagactcctaaaggggaactcccctccagctgcgctgggaccccaggaccctgccccggcctgaaggccaggtgagtccattccctaaccctccctggcccactccaccccactccaccctcctccacctggaggtgacctcatctaacccacccctctctccgcctacagggcacccagatgtgctgctcaagggagccccaagggctggaagggggttgtgaaaccgaaataaactgccaagcctggtctgtcctccagggtgcaaaggaagagtgcagtggccagcagggggcagcagagggcagcaggcactgggaaagggccgtccccaggcctggtccccacctgaacaacaggagtccaggccccagcccctcctccctcagactcaggagtccatactccagcccctcctccctcagacccaggagtccatactgcagcccctcctccctcagacccaggagtccatactccagcccctcctccctcagacccaggagtccatactccagcccctcctccctcagacccaggagtccatactgcagcccctccttcctcagacccaggagtccatactccagcccctcctccctcagacccaggagtccatactgcagcccctcctccctcagacccaggagtccatactgcagcccctccttcctcagacccaggaatccatactgcagccccttctccctcagacccaggagtccaggccccagcccctcctccctcagacccaggagtccatactgcagcccctcctccctcagacccaggagtccatactccagcccctcctccctcagacccaggagtccatactgcagccccttctccctcagacccaggagtccaggccccagcccctcctccctcagacccaggagtccatactgcagcccctcctccctcagacccaggagtccatactccagcccctcctccctcagacccaggagtccatactgcagcccctccttcctcagacccaggagtccatactgcagccccttctccctcagacccaggagtccaggccccagcccctcctccctcagacccaggagtccatactgcagcccctcctccctcagacccaggagtccatactccagcccctcctccctcagacccaggagtccatactgcagccccttctccctcagacccaggagtccatactgcagcccctccttcctcagacccaggagtccatactgcagccccttctccctcagacccaggagtccaggccccagcccctcctccctcagacccaggagtccatactgcagcccctcctccctcagacccaggagtccatactccagcccctcctccctcagacccaggagtccatactgcagcccctcctccctcagacccaggagtccatactgcagcccctccttcctcagacccagtagtccatactgcagcccctcctccctcagacccaggagtccaggccccagcccctcctccctcagacctaggagtccaggccccagcccctcctccctcagacccaggagtccagacccccaaccccttctccctcagacccaggagtccaggccccagcccctcctccctcagacccaggagtccagacccccaaccccttctccctcagacccaggagtccaggccccagcccctcctccctcagacccaggagtccaggtccccagcccctccaccctcagatcttcaaatggaatctggggccaggcacggtggcgcacgcttgtaattccaaggctttgggaggccaagtgggaaagactgagcctaggaagctgaggttgcagggagctgtgattgtgccacagcaatccagcctgggtgacagaccgagatcctgtcttaaaaaaagaaaaaaaaaaaaaagaaactgggcccccagccttctctgtgatacccaggagtcctgctctcaggatttagaagtccagaatcccaagttttctgagaatcgggcatccaaccctcctgcttcatcatggcaaaaaaaatccctggacctagacccagatatccaggttaagtccctggtcaaaaggaccacacatttccctgatggttatccaccttgccttgccacggtctgtgctcatccctctctctgtccttcattcctctctgacatctttctcccagagtaactgctaacttccagtctaaatcttgctgaggaagaagagataccacctcatgattcatcttggagtggcccaagcctccctccaccttgtttaaattgccccattcccggagaccttgccctgtgcccagcgctgggctgagcaatgctgaccaggaagcagtgatcactgccccactagggctcaccttccactagaggaaagagacctgtccctagacagtgatgacccagagtgggcatggctggggtagggaatcccagggggctacaggaacccagagtgggcacctgactcagcctgggaggtcagggagtgcttccaggaggaggcgatgtctgagctgatacttaaaagatgatgaggccagacgtggtggctcatgcctgtaatcccagcactttgggagactgaggcaggcgggatgcttgagctcagaagtttgagaacagcctgagcaacgtgatgaaactccatctccacaaaaaattttggaaaaattagccaggcatggtggcacatgcctgtaagtcctagctactcaggaggctgaggtgggaggatggcttgagcctgggaggtcaaggcttcagtgagccgagattgcaccactgcactccagcctgggcaacatggcaagaccctgtctcaaaaaagaaaagaaaattttttaaatgatgaaaaagtattccaat[131 bp omitted]aacatggtgaaaccccgtctgtactaaaaatacaaaaattagccaggcatggtggcgggcacctgtaatcccagctactcgggagactgaggcaagagaatcacttcaacccaggagatggaggttgcagtgagccgagattgtgccattgcactccagcctgggcaacaagagcgaaactctgaaaaaaaaaaaaaaaaaaggaaggaagggagggagagagaggaaaaggaaggagggaaggaaggaaggagagaaagaaaagaaaggaaggaagaaagaaagaaagaaaagaaagaaagagaattttcacagatttagttccaagcaacagatgctacctcaggggcagaaagggaatttattgagaggatttggggtcactcacagaatcccaggagtgaactggggaatcaggattggaaagtgagcaggaagaatcctggcaactggccagcaatggtaacccagccacagtgacaccacggaaccggtctgatgaggccatgctggcgatggccactagacactgtagttgtctcgctgcctctgctgccccagaaataggatatggctgctcttctcattagctgttgctggtaataaatcacttcacaacttagccgcaaatgacagcaatcattgcattaagtctcatggttgctgtgggctgggatttgaagaaaggcgtggctggtttgttttggctcaggatgcaaacaaacagtgcaatcagtgatgcttgccacagggcggctgggggtgctggacaagtgggcatctctctgtggtctcagggcctcccccaccatatagtctctgcactggccagcttgggcttccccacagcatggctgcctcaaggtagtcaaactttatatggccgctgaagacccaggcagaagctgcatggccttttctagctcattttgggagttccgcaacttcacttcagctgaattctgttggttgtatgcaagtcaccaaactgcacagatttgagaggagggtgccatagaccccagctcttgatggaaagagtatcaagctctcattgtggaaacacacatgggatgaaagacactgtcacaacatggcaaaaccccattcctacaaaaaaaaaaaaattaactaggagtggtggtgcacacctgtactcacagctacccaggaggctgaggtgagaggatcacttgagccctggaggacgaggctgcagtgagccatgatcatgccattgcactccaacctgggtgacagagcaagaccctgtctcaaaaagaaaaaagaaagagattgttgtagccgtctttggaaaacagaatctgtcccagctgccatgcatggctggaagaggtggccaattcctgatattcaaaagtgtggaaggatttgccaagcttaagtcaccttagctccaacagatgcaggaaagcaaacatccattcttgttggcttcaagagtgggcaacagaggctttcagacagtaggaatttccttaaatgtgggaaggagctgcagatgctaggtaatccttcccgcaaaatatgtactatagcccgctcctttggttttttttgttgtgttttgttttttagacaaggtctcactctttcacccaggctggagtgtagtagcacgatcttggctcattgcagccttgatctccccagttcaagcgatcctcccacctcagcctcctgagtagctgggactacgagcacaaaccaccaccacccccggttaatatgtattttttgtagatacagggttttgccatgttgcccaggctggtcccaaattcctgggctcaagcgatccacctgcctcagcctcccaaagtgctgggattgtaggtatgagccaccacagctggctttgaatgttcaatatcaataggccctttgcagaagttcttatcgaaactttccccgcacaaccgtctctcattgtacaatcaaaaaatgcattcacactgccacccaatacaaaaaatttcaatagttccattttccagatctgagactggaatcagggaagaaccattcccctccaaatatgtcattctccccatattccacaagctgtgagctagttgtaaagttaatcgtcacacactgtgtgaaaaataatgggaaaaaaggtcaagaaaagataagtcagccaggcactgtggcttccgcctgtaatcccaacattttgggaggctgaggctggtggatcacctgaggttaggggttcgaaaccagcctggccaacatggtgaaaccctgtctctactaaaaacacaaaattagccgggcatggtggcgcatgcctgtaatcccagctacttgggaggctgaggcaggagaattgcttgaacctgggaggcggaggttgcagtgagccaagatcacgccattgcattccagcctgggcaacaagagtgaaactctgtctcaaaaacaatgaaaaggtaagtctggccaaccgtggtggcccacacctataatcccagcactttgggaggctgaggtaggaggatcgcttgagcccagagtttcagaaaagataagccttgttagttaaaatatgtgaggatatacacctgcggccgcatggatggaattagaactttttttttttttttttttttttttgatactgagtctcgctctgtcacccaggctggggtgcaatggcatgatctcagctcactgcaacctccacctcctaggttcaagcaattctcctgcctcagcctcccgagtagctgggattacaggcacctgccacaacccctggctaatttttttattttaagtagagagggggtttcaccattttggccaggctggtctcaaactcctgacctcgggtgatccacccacctcggcctcccaaagtgctgggattgcaggcatgggccaccatgactggccatttttatatttttttgtagagacggggtttcgctatgttgcccaggctggtctcaaactcccgggctcaagcagtcctcccgcctcaggctcctaaattgctgggattacagacgtgagtccctgcggctgacctggacctcagcttttaccctaagtgagacagaagtcatgggaggaccctggggcagaagagtgacatgagttgattcacatgtaaaaggaatccttcaggctgttttgtgagaataaattacaggggacaaaggcagatgatgttacaagactagtttctgcaagtctgcaagggtccacggctgctgttttggtgtttctgacttttctccttcatacacatgccatagagttctcctccctcacccagaacctcagatggctaggttcttcttttttttttttttttttttgagacagaatttcactcttgttgcccaggcaacatcgtgcagtggcacgatctcagctcagtgcaacctccacctcccagattcaagcgattctcctgccttagcctcctgagtagctgagattacaggcatgtgccaccacgcccagctaattttgtatttttagtagagatgcggtttcaccatgttggtcaggctggtctcgaactcctgacctcaggtgatccacccacctcggcctcctaaagtgctgggattacaggcatgagccacagcgcccagcctcagctggctgggttcttgagggaggtggaagtgggcgatggctgctgagagggcatgtaccagggtccagcccaaacagaaggtgcacaggctggggacagaagagctagggtatgggtgtcggtgctcacagtgtgtgagcttgacagcacctgggactgtcttggagtgccgccgcattccccatgagtgagtttgtattgtatatcctgggatgctccagtctggatggaatctgcacgtgagtttgtgtgccttgcaaacaaaccttccctgagcacctgcactgtgtctggtcttgtgctgggcggggtgcccaggggaggagcccttagctcaccacagtgatcaagacatccctggccctgccctcacaggctcacagtccactgagggagacagacctatccccagccagggacccccagagtgtgccgggctcaggtgggggagcccagagggggaacctgacccagccagggaaggcagaggggacttcctggaggaggggatggtacagttaatcctaaaaggtctttcccaatgtaacagttgctctgtaggatggatgcagtggctcatgcctgtaatcccagcactttggaaggcaggaggatcacttgagcccaagagttggagaccagcctgggcaacatagtaataccctgtttctattaccaaaaaaatacaaaaattagctggacatggtaacacaagcctatagtcccagctacttgggaggctgaagtggaaggattgcttgagcccaggcggttgaggtttgaatgagctatgattgcgcccactgcattcccggctgggcaacagagcgagaccctgtcaaaaacaaaacaaacaaacaaaaaaaacgttggtctcctgtatgaccaatggataaagtaaccttgaccagtctaataactcccaggctgacctgtaatccaagccttctctgtatgtctgagcaggcaaagcccagctccagggctacctcaacccccaggctgatcagaagcttgggtaacctctcccagtgtggccagcgaccccccaccctcccacgttctgaccactgtcctgggcaactagtgacatctagtgggggattttgtcccagtctgacctggcctgtaggggccttgggcagtcggacctgtgacccacgcttcctagcagtggctggactcctcccccttcccgcaggtgccctggcctcttcccctgccctcctcacctgctctggccagtctgactcctcccttccccacaaggttgggagggaatgaaggagagagcgggaaggaggaagggagggtggcattcctgggattccctggatagggggaagagtgggagggccttccatgggtgagcaagcagagagggcaccccgtaccccacccccagccccatcatcgaagcggcctaggaggacctggatttgaagaccattgaaaataagagattaaaccggttgattccaggctactggtcagacgaggaaagcagcccagagcactgaccacaggggaaaacatctccgggcatactgggagcagctgctgggggccactggtcaggctgcgggggtcactggttggactgggagaggccagtgcaggccactcggacggcacgcttggggccattagttacactgggagaggccatcgcaggccacaggttgcagtggggtcctctggttaaaatcgacgatgccagcccaggctgctggtcacagtggggacgagtccccaaggcccctggtcagaataacgaggagaaggtccgcgattgcctggtgagatcccagctcgggtcactggctacgctggtcgatcaggccccccgctgcaggcgctggtcagtaagcccggacagctctaggcttgggggcggacgagccccgagcctggccccgtgcactgggaggtccgctccgggcagtgggaggtcctggccccgcgcccgggcatcgggggacgaggggggcctggagggcggggcggggcggggctgccgggggcggggcctctggctcccagccccgcagcggccgagctgcagcccgggctcagtctccgccgccgccgtgaacatggagcccccggacgcaccggcccaggcgcgcggggccccgcggctgctgttgctcgcagtcctgctggcggcgcacccaggtatggctcgggctgagggcaaggtgggactggggagaggcccctggggaccccgggaaagcgaggagaaagggctttaccctgaccccaggaagcaaaatgtggggaccccaaggaggagggatatgggagtgttggaaggtacgccttccagtgagagagatctggggacagccaggcaggagagctggggatacccaggcggtggatcagagacaaccagagaagtcagcccccttcccactcagcaccctggaatctgggtcccacctgcctcctccctcagaccctggaatctgggcccccagcccctctttcctcagacccaggagtccaggcctccagtggctagaatagcttcccccagggcacagaggatcaaaaccccagggctctctccctcaaaggtcctcaagttttgagaggtccagggaccccttagagaagcgaggaccatgtgtccccacaccagcgatccacatgtatttaggagtttccagagtccagtataaagaacccgcctccctcaggaaagggctggagcaccagccccgggcagtgacagtggaacaaagtgtttccaagtgacaggcccccttcctggggcctcagctacatttacacacctgcatgaggatagaaggagaggaggccgggggctggggggtgggggtgggggtgctggggacagagggacagagagatgagagagattggggaagagagaggaactctctgcctccacttgtctgcagatcagacccagccttaggcaccagcctggaccccgtcacccctccctggggacaggctggggccagaggtgagcgcttgggaatccaggcccctggcacactcatggtcaacagtgggtccccaggggtagggctgggccagattgagcagagaagggaagggagtttctaagaagcactgagagctgatgccaggatgccagcccagagggtgagggagggtggtggtttttctacaataactactccaccaggccccagcctcctcttccctctgatcccaggagtccaggtgcccagcttcccaagatcctgggcctcaaccttatccttttgcaagatgactcgacttatcccgtttgctgttgtatcaaactgaggggggccaagaggcggctgggggctctggctccaggccgggcaggtctcagccagcctgtccctcccacattcctgaaacctgcccagccctgtcccccctcaccgcccccacacatccatcccgcctaagctccgggcccagccgcagcccacaccccagcccctcactcatgggagagcggaagagacccagggactgagtggtgcaggtgcagagagaggcagagacagggacagagatggagacccaagaggagagacacacgcaaaggtggagaccaggatggagagaaacatttatccatcatcacagaggtggccctgcccagggtgctggaggcaaatggctgagccaggcctggccctgccctggggggtggcgtgtgctctgttgggataagcaaaggctggtgcagtattaccccaggagtgttcagcggaggccacagggccctgtgcagcccagaggaggagccctgagctctgcaagtgcagggagagatggatttgagacccagagatgcagggagaagggatggagggcgaaaggatctcagggaggaggggctggggcctagactcctgggtctgagggaggaggggctggggcctggactcctgggtctgagggaggaggggctggggcctagactcctgggtctgagggaggaggggctggggcctagactcctgagtctgagggaggaggggacaggggcccagattcctgggtctgagggaggaggggctggcacctggactcctgggtctgagggaggaggggctgggacctggacgcttgtgtcctgggggagaggggaccctgtctggagggctcttcctgttggtgtggtggatgatagctcagttgctctcttgcagatgcccaggcggaggtgcgcttgtctgtacccccgctggtggaggtgatgcgaggaaagtctgtcattctggactgcacccctacgggaacccacgaccattatatgctggaatggttccttgtgagtgcttggggctggggggcctggagtcagggcacagcagggcagcaaaggttcattctctcatcagtgcctaaggcctgtagagatccaccaagccacactccttgttacagatggggtcactgagtcccactgaggggaagggatctgcaaggtgccccgtgtctaggcacagccaagtctagaatgacattgacctgctctggactgcggg[222 bp omitted]gaggcaggagaatcgcttgaacctgggaggtagaggttgcagtgagccgagatcgagccaatgctctccagccaggcgacagagcaagactctatctcaaaaaaaaagaggaaagaaaatgagagacaatcgggagagggagagaccaagaggagaagggatgggaccggaatgagatggagaaaaggagacaggaaaaatcaagaactgatagggaatgggggcaggagaaggtggggagggacagagggaccagggagacccataacaagaggaaaagaggcagagccaggagctgcagagagaaaggacccagagagagagagactgaggagcgctgggacacccggagctgagagcctgccccgcgcccacagaccgaccgctcgggagctcgcccccgcctagcctcggctgagatgcagggctctgagctccaggtcacaatgcacgacacccggggccgcagtcccccataccagctggactcccaggggcgcctggtgctggctgaggcccaggtgggcgacgagcgagactacgtgtgcgtggtgagggcaggggcggcaggcactgctgaggccactgcgcggctcaacgtgtttggtaagtgtcctcgggcatcccccgaagggaggcaggcagggaggggcgcagggcaggggctcctgacgtgaacgtctttttcacagcaaagccagaggccactgaggtctcccccaacaaagggacactgtctgtgatggaggactctgcccaggaggtacctctcgggtggaccttggccccagggtcctggaggaggaggggacagggccctggactcctgggtctgagggaggaggggctggggacccctgggtaataaaggaggaggggtaaggccaggcgaggtggctcatgcctgtaatcccagcattttgggaggcagaggcaggcggatcacctgaggtcaggagttccagaccagcctggccaacataatgaaaccccgtctctactaaagatacaaaaattagctgggtgtgttggtgtgcaactgtaatcccagctgctcgggaggctgagacaggagaatcactcgaacccagaaggcagaggctacagtgagctaagatcacaccactgcactccagcctgggccacagagcaatactccgtctcaaaaaaaaaaaaaaaaagaagaagaaaagaaaaaagaaaggaagggcagagggggaagactcctgtgtcctaggaaggagagagctgggggacccagaatccttggtccctggaggatggtgctggaggcctggactctttagtctgagtcggggactaggaatttggactcctgggtcctgggagagtcgggagttaggagcccggctcatgagtctgagtggggagaactcctgagagaggagccccgacttcagagtcccagctccaagcccagggccatgcccgtgtctgcctcagatcgccacctgcaacagccggaacgggaacccggcccccaagatcacgtggtatcgcaacgggcagcgcctggaggtgcccgtagagatgaacccaggtgagcagcgcaggagcgcggcgggacgtgggctggggtgggtggcggggctatggcctggctgactgccacctcccccgatctctcccagagggctacatgaccagccgcacggtccgggaggcctcgggcctgctctccctcaccagcaccctctacctgcggctccgcaaggatgaccgagacgccagcttccactgcgccgcccactacagcctgcccgagggccgccacggccgcctggacagccccaccttccacctcaccctgcactgtgagtctgtgctggcctttgacctctgacctcaggctccacacctcatgaggcctgaccctccacccgggggcttcacactcccctctgaccctctgcctccctacttcatgctaaaaaaaaatgtgctagtgctggccactgacctctgacctcaattggtcgcacaagccccatcctgacctctgacctccgacctccacttagcaccctggaccccatgaagtttatgactaaatggtgctttccaccttctcacactgaattgggtccccccatgacatctggctccaagtctcacactgacccatcgcccatacggacctctgactcttgacctatactcttagtttatttcaacctctgaactctggcactcagaataattgtgaacctgaggcttgaaacctatgacccgtaacctttgacccgccatagccctcacctgggatgcagggctgacctctcgcctgtcctctagccttgacccttcccctgatcacaattcccatctccctgcccttcccttagatcccacggagcacgtgcagttctgggtgggcagcccgtccaccccagcaggctgggtacgcgagggtgacactgtccagctgctctgccggggggacggcagccccagcccggagtatacgcttttccgccttcaggtgacccacccaagggtccctctgggatccaccccccagcccctgacctctgtgacctgctaacctgcataacttctaatgtgggacctgggagtccccatggcttaggcagccacctgatctggtggcccacgaactaaaaggacctctgacccctgatttgagagagtcaggacttagcatgccacctgacttgatggcccctgacccctgattctggcttagcatgacactaacctggtggcttctgacctagcatgagcccgctgaaccggggtggcttctgagcctggttcctcgtcccccgtctcccaggatgagcaggaggaagtgctgaatgtgaatctcgaggggaacttgaccctggagggagtgacccggggccagagcgggacctatggctgcagagtggaggattacgacgcggcagatgacgtgcagctctccaagacgctggagctgcgcgtggcctgtgagagccctgggtgaacgggcgggcaggaggggccctggcatcagtgcctctgcgccctcctccctacagccctgaagttgctctgtcatcccaaacactctgccttcaaccctttctctgcatttcttgggggtttttttggttgtttttttttttttttttttcccagagacaggacctggctacgttgcccaggctggtctcgaactcctcatgcgatcctcctgccttgctctcccaaagtgctgggattacaggagtgagccaccgcatcttgtcgagagctctttccatagcacagacctgaccctcctctgctcagaatctgccatggctccccagtacccttgggagaagcccaggtgtctcaccatggccttcaaggtccacctggccagttccaccattagctagctgatccttctccccagtcaaggctatctcctcatcaccccccaggctcctctggttcctaccttcactgcccatccttcctaccgtctatttctcaccaatcccttgaatcccaggcttctaagaatgattttcagttcattcgcatccaggccctggggaaaggctgtattctcccttggcacttcttacatatcccttcctggggtagaccctgcgccagatgctggggacacatctgtgaacaagacagaccacccctgttatttcagtaggggagacagatggtaaatgctaactaagccctttcgtaacagtagtgtatctacaggtgatatcaccagtgagagagagcaggagaggggattattttaggtggcaggtgttgcagtctgctttcctgagaagcagattctgacttggatgttttcaggcaagaagtttatgggaagtaccctgggttccgcacctcttgggtctagggaggtaaaggaagcaagatttggcaaggtgagaagttggactgaagtctaaggaaggtctcaggctgggtgcagtggttcatgcctataatcccagcactttgagaggctgaggcaggaggattgtatgagcctaggagtttgaggccagcctgggcaacagagggagaccccatttgcacacacacacacacaaattaaaaattagccaggcatagtggcacacacctgtagtcccagctactcggaggcccaggtgggaggatcccttgagtctggaaggttgaaactgcagtgagccaagattgtgccactgcactccagcctgagcgacagagaaagaccccgtctcaggaaaaataaaaataaaaaagtaggccgggccccgtggctcatgcctgtaatcccaacactttgggaggccgaggtgggtggatcacctgaggtcaggagttagagaccagcctggccaacatagtgaaaccccctctgtactaaaagttagccgggtgtggtggcatgcacctgtaatcccagccactcaggagcctgaggcaggagaatcgcttgaacccaggaagcggagattgcagtgaactgagatcgtgccattgcactccagcctgggcaacagagtgagactccatctcagaaacaaataaaagaaagaaagagggcctcagtcagccccacggggtacttggaatccaggatggcccttcacagttgtccccagttggggtgagggggctgggccttaataacctctacatcaaccagtcctcagaggtgtgctggccttaggcaaggggctctcagcagctgaggcagctcccagagaggggtgacagctgcaggctgacagctgtcatccttcttagcagctggtggaataagtccttccgtgctgtaggaaagatctgggtgtccacaataggggaggtcagggaagcctctgagaagagaca[132 bp omitted]gaaaccccatctctactaaaaatataaaaattagccaggcatgatggctggtgcctgtaatcccagctacccaggagactgaggcaggagaatcgcttgatcctgggaggcggaggttgcagtgagctgagatcgtgccactgaactccagcctgggtgacagagcaagagtctgtctcaaagaaaaaagaaattggccgggcacggtggctcacacctgtaatcccagcacttttgggaggcagaggcgggcagatcatgaggtcaggagtttgagaccatcctggctaacacggtgaaatcccgtctctactaaaaatacaaaaaattagctgggcgtggtggcaggtgcctgtagtcccaggtactcgggaggctgaggcaggagaatggcatgaacccaggaggcagagcttgcagtgagctgagatcccgccactgcactctagcctgggcgacagagccaaactctctcaaaaaaaaataataagaagaagaaatgcagagagctacaaaaagagcactgcaagtagagtgagcaagtgcaaaggccctgaggcaggccccaacttggtctactcaagaaaaacagcaagagaacggggtagctgggagcacaggaggaatggggaagagtgggagatggttcaagaggtgggtgagggccagaccaggcagcatcttttaggcaccctcaagaagtttggcctcgatgccaagggtactggggagccactgcagggttttatgcagaggggagggatgaccagtgggtggttggttttttttgtttttttttttttgagtcagagtctcactctgtcacccaggctggagcgcagtggcacaatctcggctcactgcaacctccacctcccaggttcaagcgattctcctgcctcagcctcccaagtagctgggactataggcatgcaccactatgcccagctagcttttggatttttagtagagatggggtttcaccatgtgaccagggtggtctcgaactcctgacatcaggtgatgcacccgcctcggcctcccaaagtgctggggttataggcatgagccaccgtgcccggcctgaccagtggatgttttaaagaggtccctctagctgctcagtggaggatggacaagagggaggagcaggctagtgaagaggtggttgggacagtcaaacctggggccagaggtggcaggaagccagaggatttgtcctgggagcagaccagataaagacttgctgaggccaggagcaggggctcacgcctgtgatcctagcacttttgggaggtcaagacaggaggatcacttgaggccaggagtttgagacccagcctggccaacatagcaacaccttgtctctattcaaaaacaaaactttgcagaaaagatgtttgggggtaacagggaggttaccccacaggttggggtttgagcaaaaggtttgtgtgctaaagtcacagaagggacaccttccacacctaaggttattcattaaccttgggctcagatgtcagctctgaagaaaagtaattgacttgggcatgtcaatgttggggttagactgctagatttttggttggagagcctggatgggagaatggagatttcatggagatggggtaaaccaggaggattacttgctgttctctgcttccaactgtccattcatgtttgcacccccgaccgcccctggagagcccctaattgagtgggtggcggtctgggacgagtgacagactgtcccccactgcagatctggaccccctggagctcagcgaggggaaggtgctttccttacctctaaacagcagtgcagtcgtgaactgctccgtgcacggcctgcccacccctgccctacgctggaccaaggtgagagggagaggagccccctcgggccctgcactcgcaccctcctctctcccctcactcctcgccctctcacagcgtcctcctcctcctctgcccttcccaggactccactcccctgggcgatggccccatgctgtcgctcagttctatcaccttcgattccaatggcacctacgtatgtgaggcctccctgcccacagtcccggtcctcagccgcacccagaacttcacgctgctggtccaaggttcagggggcagggagggggtgggcttggatggggacagtgtggggtgtgggacctggacaaacaggacgagttcctgagtccctggctggggactccatcttctgctcgatgcctctcttctctctctctctcctctcccttcactttcttcccatccccaccacccacaggctcgccagagctaaagacagcggaaatagagcccaaggcagatggcagctggagggaaggagacgaagtcacactcatctgctctgcccgcggccatccagaccccaaactcagctggagccaattggggggcagcgtaagggaccttcctctccaccctgagccccctctcactcatccaagtatcacaccctcctttccacttcctgggagactggacgtcgttcacctctgcccttgaccccaccccttgaccccaccagccggggcctgatcggagcctccatagcccgcagagccaatccccggacggcagggttgggtgagcagctctctgaccctgaaagtgaccagcgccctgagccgcgatggcatctcctgtgaagcctccaacccccacgggaacaagcgccatgtcttccacttcggcaccggtgagtgactgaggtggtggcagaggagccgggtgtggggcagacagagcccactgcctgacccacgcctctctccatcctgtccctgcagtgagcccccagacctcccaggctggagtggccgtcatggccgtggccgtcagcgtgggcctcctgctcctcgtcgttgctgtcttctactgcgtgagacgcaaagggggcccctgctgccgccagcggcgggagaagggggctccgtgagtggcctgctatctgcaatgaccaccatagcttaaccccatccccaccctcaaccccaagctcaacccataacctcaaccacatcttatcctccaccccacatcccaccacatccacctccatccccaacccatcctcatccccaactacagccccaaacccagccccagactaatccacagccatccccaactcatcctcatccccaactgcagccccaaacccaacccagggccatccccaaacccatccccaagccaaactcaacaccatccccttccctaatcacctctcctgcccctagctcagcctcatccccaactccatgcctgtctccaatcccaaccctgcccccaatctcccctcaactccaatccataacccccttcaaaccatcctcaactaagctcctctccagccctggccacatccccatcctcccccaacctccagccccaacacccatcatccccctgagctcacccttaactccaatttatcctccaagcctatctctcaccatccagccctcacctagccatttcccaaccctagtcctccaccgtcccgaagccaacttcacccatgtccccatccccaatcttgtccccattcctgactccaaatccaacccctaagcctccccaagctcctcctcatctaaccttgtctccagccccaaccacatggccgtcctcacctccaatccgtaaccatcccagaccgatcccaaagccaactccagctacattcccacctccaaccccaatagcatctgcatccccatgcccaaccctaaccccagtgccattaccagcccctaccccatccctatgccatccccacccagcacacccccatcctcacctccatccccagccgcatcctagtcccacccacccccatcctcagttcctccccctgccgtgtgcacctccaacacgacgcctccgcccgctgcctcctccccccaggccgccaggggagccagggctgagccactcggggtcggagcaaccagagcagaccggccttctcatgggaggtgcctccggaggagccaggggtggcagcgggggcttcggagacgaggtgggtgagggcctgggccccctggtgagagggacctgctgggcagtggagcacgcccgtgggcacaggctgacctctccatccgctccccagtgctgagccaagaacctcctagaggctgtccctggacctggagctgcaggcatcagagaaccagccctgctcacgccatgcccgcccccgccttccctcttccctcttccctctccctgcccagccctcccttccttcctctgccggcaaggcagggacccacagtggctgcctgcctccgggagggaaggagagggagggtgggtgggtgggagggggccttcctccagggaatgtgactctcccaggccccagaatagctcctggacccaagcccaaggcccagcctgggacaaggctccgagggtcggctggccggagctatttttacctcccgcctcccctgctggtccccccacctgacgtcttgctgcagagtctgacactggattcccccccctcaccccgcccctggtcccactcctgcccccgccctacctccgccccaccccatcatctgtggacactggagtctggaataaatgctgtttgtcacatcaacaccatcctgtggccagagcttcctctgggagtagggaggggaagggcgatgcaggtgattccctgctctcagctgcccccccatccgcccccttgcaagacctcagaagacgcctgatgtcatggagaaagaaatgagacagggctgggcgccgtggttcattcttgtaatcccagtggtggtggctcacgcccgtaatcccagcactttaagaggctgacactggagggtggcttcaggccaggagttcaagaccagcctgggcaacatatggagaccccatcgctacaaataataatactaataatacagaaattagccaggtgtgcctatagtcccagctattcaggaggctaaggtgggaggattccttgagcccaggaatacgaggttacagtgagctatgatcacgccattgcactccagcctgggtgacaaagcgagacttcatctctaaaaaaaaagaagaaaacaaaaagaggccaagctcagtggctcaaacctgtaatcccagcactttgggagaccaaggcagggggatcactttaggtcaggagtttgagaccagcctggccaacatggtgaaaccccatctctactaaaaatacaaaaaattagccaggcatggtggcgcgagcctgtaatcccagctacgtgggaaactgaggag[134 bp omitted]acgcagagggcgacttagctggccgggggtggacggaaagatgccaggtcccgagggtgctgggcttggcccccgaggaccagcgtctgcctggagatgggtgctgtccccttaagtaaaagttcccagtctgtcttgccagagccccagagggaattgaaactgggcgaggaaaagctccctcttagctgtagagtcaatagaattagggatggagccacctcctctggggaggagtccctggggaaagcggggagcttggaggaatccagagaaaagggggcctggggcagagaggacacacagacattacaaggccaagaaagagggacgtgagaaagggatggaaagatttagggggaggcaagagggatgggttgggaagctccgagagagccctggagtaagagacaaaaatagatctggggagacagacaaaaagagtagtgggccaggtccagtggctcatgcctataatcccagcactttgggaggctgaggcaggaggatctcttgaggccaggggtttgagaccagcctgatcaacataccaagaccccatctctacaaaaaataaaaaattagccgggcatggtggcacacgactgcagtcctcagcacaggcaagaggatcacttgaggccagcagttcaagaccagcctgggcaacatagtgagaccccatctctacaaaaaaataaaaaattagctgggcatggtggcaaacacctgtggtcctgcactttgtgtgaccaaggcaggtggttcacttgaggccagtagttcaagaccagcctgggcaacacagcaagaccacatctctacataattttttaaagagaaatacagagaaagaagaactggagttagagagatcattgcagttggaaagggagagaggaaatgcaagcagctgcctagaaggacggaggagggtagcgggaggtcagcacgggtgactggctggcgacctcacctctctgagcctttcttgtgcatcgaatggggatcaattgcactttggccacggcgggctgctgtgaggtgtcagtgtgatcttagagccatgtggggtgatgggggcattgcactcacacaccacccagggcctcctagcattgccttctcaaatctcaggcacgcagctccactctctgctctcagtcacctcagccacaaagtggacagagtgggatctgtcaccataggaaattattcggatgccacagaagcctccttcctggtaggtaaaccaagcagcctgcccaggcagaagagctcatgggccacgttaaggcgctcagatcccatggtttattgaattcatttaaaacaaacacaaggttattgtttgtttttcaactgtgtggtggtaggaagtgctcctgacggttttcccatggcaataatttactccttgatttcacccaccactactgtgacagctttctctcactgattcacccaaaagtgggcttttctttgtcattcattcttttttttttttttttttttgatggagtgcagtggcaaaatcatagctcactacctcaaactcctaggctcaagtgatcctcctgcctcagcttgctctgcagctagacccacaggcacatgccatcacacccagctaaatttttatttttattttttgtagagacaaggtctcaaactcctggcctcaagcaatcctcctgcacaaagttttaggattacaggtatgagccaccatacccagcctaaaaaaaaaatttttatttttttatttttttgagacagggtctcactctgtcacccaggctggagttcagtggcaagatctcggctcaccgcaacctccacttcccaggctcaagcgattctccagcctcagcctcctgagtagctgggtctacaggcataagccaccaactcctggctaatttatgaattttttgttgagacggggtttcaccatgttgcccaggctcgtcttgaacttgagctcaaaatgatctgcttgccttggcgtcctaaagtgctgggattacaggcctgagccactgagcccggcctctaaaaaactttgtattaacaactttcttcttccaaaaaacctgcagttcccactcttgtcaatgtgtgtgaggtgcccattactccatactttggccagcacttgcaattatcctctaaatttttgcctacttgatgggtaacaaaatggctctcatatttgtgtctctttttttttttttgagacggagtttcgctcctgttgcccaggctggagtgcaatggcacaatctcggctcactgcaatctctgcctccttggttcaagcaattctcctgcctcagcctcctgagtagctgggattacaggcacccgccactacgcccagctaattttttgtatttttagttgagacggggtttcaccatgttggccaggctggtcttgaactcctgacttcgtgattcacccacctcggcctctcaaagtgctgggattacaggtgtgagccactgtgcccggcctaatttttaggcggggtttcaccatattggtcagtctggtcttaaaactcccgacctcaggtgatccactcgcctcagcctccaaaagtgctgggattacaggtgtgagacaccgtgcctggccgataatttggtcttgaggtccctttcatgagcatggccatagactctggctttgccctgcctgggctccaggggattagatcataagtgtttacaatgtgcttttcagcagattttcctttatcctggcaggcagcccaatgcctaagtgtctgacttgtacacaggtgtccctctcacaggaaatgtatttatactggccaagaccctttgtggctcttatctgacctgtgtccagtttattccaaaccaggaaagtcattaggttcaggtgtgtcagtcaagtgacacacacaaaggaggcaactcaacaaaacacatgaaatatcagaaagaggcagggtgcagtggatcacgcatataatcctagctcttcaggaggccaaggcaggaggatcacttgatgccaggagtttgaggccaacctggccaacatggcgaaaccctgtctctactaaaaataaaaaaattagccgggcgtggtggtgtgcgcctgtagtcccagctactcaggaggctgaggcaggagaaccacttgaacccaggaggtggaggttgcagtgagccaagatcatgccactgcactccagcctgggcgacagagggagattctgtctcaaaaaaataaaggaagaagaaataacagaagcagaggctggacatgatggctcacacctgtaatcctagcactctgggaggccaaggcaggaggatcagttgaactcaggagttcgagaccagcctgtgcaacatagcgagaccctgtctctatttaaaaataaaaaaagaagaaagaaagatataacagaagcagtttattacttatggatcccagagagaaaagagcagcacacttccctgggccagtgggaagggggcagctgcctgagacatgcaggctcaaccagcaggtggagagagacccccccaaagcctttactgcggtccagggcatggcggagacggagttccccaggagagttctaactgatgggtttagaacaagcaggcacaagaattccatagagacacactgtgatggaggttgtcatatctgcacagtccattcattggaggtgtggggatcagtagcttgggtcaagtagtttgtatctatctagctgtcccatacagagatggtcccatacaggaggaggtgagataaagctgataccttgatcaactccagtaagaaactggaaggagagccgggcatgatggcttacacctgtaaacccagtgctttgagaggctaaggcaggaggattgcttgaggccaggattttgagaccagcctggacaacataatgagaccctgtctctaaaaaagaaatagagagaaggaagagaggcagggagggagggaggaaggactgggaggaagtatagagctggaaactgtgtcaaggataactaagtccagattttggcatgagaaagttaaacatattcagaatggatgctaagacaatatagaattatacaaattcaccacaatggcatattaatttgttttcatttgaatttccgtgacctctagtgtgaaaatggtgtttctctgtatgttcattggccatttgcttttcttgtttatgaactgtggtatactcttgcctacttttctctttttttttttaccttttcttattaatttgcaggatctctctacacaccaggaatattaacctctaatcttataaagcttttatctcaggctgggtgccgtgactcacgcctgtaatcctaccactttgggaggacgaggtgggtgaatcacttgagtccaggagttcaagaccagcctggccaacatagcgaaaccctgtctctactaaaaatacaaaaaaatagccaggcagggggtagccaggcatgcctgtaatcccagcactttgagagaccaaagcagacggatcgcttgagcccaggagttcaagaccagcctgaccaacatagtgaaaccctgtctctactaaaaatacaaaaaattagccgggcatggtggcgcatgcctgtgatcccagctactcaggaggctgaggcagcagggttgattgagcctgggagttcgaggctgcagtgagtcttgattgcaccactgcactccagtctgtgtgacagagtgagaccctgtctttacatagatatagacagatgatgatagatagatgatagatagatagatagatagatagatagatagatagatagatgatagatagatagatagacagatagatgatagatagacagacagatatccacatagatacctcaaacctattatgtcccaaatcgacctccagtctttcctctcgcataaatggtatccctgccctccagctgggtgagcccaaaacttagaatttatcctggattcctccatttcctttacctcccactcacataacccaaaggcacatcccatgggtcccctcccatacagctctctttcctgaccacttatcccccggcttcccatattcaataaaccttttaactctataccctgccacagggcatagagctgcagctagctctttctacaaatggtttcacggccatcagtccaaacatacatcttctttcacctggatcaatgcacttataaaagcaaatgctcaacagcaatctttgatggctctaatactcacatcaattaaaaatttaaacgttacctttcagtcacccttcccatccttttaaagtggaattcctaaatctaaaatggtaaaagttaaaaaaaaaataaaacaccaagctcatatggctctataa[133 bp omitted]cggtgaaactccgtctctactaaaaatacaaaaaattagccgggcgtggtggcgggcgcctgtagtcccagatactcgggaggctgaggca[137 bp omitted]tcaattctctttatttatttatttattttttgagacggagtctcgctctgtcgccaggctggagtgcagtggcgagatctcggctcactgcaacctccacctcccgggttcaagcgattctcctgcctcagcctcctgagttactgggactacaggcacatgccatcacgcccagctaatttttttatttttagtagagacggggttccaccatgttggccggaattgtctcaaactcccgagctcaggtgattggcccacctcggccacccaaagtgccgggattacaggtgtgagccactgcgcccggccaattttttttttttttttttttttttttttttttttttttgagatggagtcttgctctgtcgcccaggccggagtgcagtggcgcaatcttggctcactgcaacctccacctcccgggttcaagcgattctcctgcctcagcctccagagtagctagattactggcgcatgccaccatgcccagttaattttagtagagacagagtttcaccg[137 bp omitted]gctgacccattgctctcatgtatgtttgtttgtttgtttgtttttgagacaggacctggctctgtcgccgaggctagagtacaatggtgcaatcatgacttactgcagcctcgaccttgggctcaagtgatcctcccacctcagattccccagtagctgggactacaggtgcattgccctcaggcccagctaatttttgtattttttgtagagatgggatttcactaagttggcaaggctggtctcaaactcctgacctcaggtgatctgcccgcctcagcctcccaaagtgctgggattatggacatgagccaccatgccctgcctataactgcttttaaacataattttatacttttccaggagcgtcctaatgcatacgtgtactgcgtattctc[133 bp omitted]gaaaccccgtttctactaaaaatacaaaaaattacccaggtgtggtggtgcgcacctataatcccagctacttgggaggctgaggcaggagaatcgcttgaacccagggggcagaagttgcggtgagcagagatcgcaccattgtactctggcttgggcaacaagagtgaaactccgtctcaaaaataaataaataaataaataaataaataaatagcagattagaaacccgtctgtgactcaggttttctcatttctcttagaataaaattcaaactcctacaaaaggctgcgtgcatagtgcctctctctctgccatccctagcttcactttccttgcctgcatcctatcagacagtctgtctctccagcccttgaatattttgtttctttcctacctctttttttctttttttgagacagggtctcgctctgtcacccaggctggagtgcagtggtgtgatcatagctcactgcagcctcaaaccctggggctcaagcaggtcctcccacctcggcctcctcagtagctgcaactacaggcatgcaccaccacagctggctaattaaaaaaaaaaaaaaaaacttttacagatggggtttctctgtgttgactagtctggtcttgaactcctggcttcaagagatcctcctgcctcagcctcccaaagctctgggattacaggcatgacccatcacacctgaccaggactctcaaacttacccttcatttgtcctgaaatctttcactacagatcctcacgtaattcattcattctcatactgcagattttggctcaaaatagcacctagccagaaatgtctttcagactctcttattttaaggagctcttgccccaaacccacccaagttacttccatcatcctaagtattaatacttttgcttgattttgttcttttctagtttctgggttctatgcatagaccatttttactaatattcatattttcttttaaataccttagaaagatattttagatttcttcatttgagccatgcacattctttgaaaatttatcctaaaatagctgggcacccagcccatcccttgaacccaggaggtggaagtggtagtgagctgcgattgtgtcgctgaactccagcctgggacaccgagtgagactccatctcaaaaacaaacaaacaaacaaaaaaatgttgggcacagtagttcatgcctagtcccagctactcaggaggctgaggcacgaggatcacttgaggccaggagtttgagatcagcctgggcaacacagcaagacctcactctaaaaaaaaatgttaatgctaacatataactttggttctgtttgtgattggcatatggtttatattatactttttttttttatttgagatggagtctcaccctgtcgcccaggctggagtgcagtggtgtgatcttggctcactgcaacctccatctaccatgttcaagcgattctcctgcctcagcctccagagtagctgggattacaggcatacaccaccacacccagctaatttttgtattttttttagtagagacagggtttcaccatgttgatcaggctggtctcaaactcctgacctcgtgatccgcccgccttggcctcccaaagtcctaggattacaggagtgagccaccgcgcccagcaaaaagttttttaactagctgagtatagtggcacgagcctgtagtgccagctactcaggaggctgtggcgggaagagggaggctgcagtgagatatgatcgcaccactgtactccaacctaggtgacagcaagaacttgtctcaaaaaaaacaaataacttcggccgggcaaggtggctcacacctgtaatcccagcactttgggaggcagagtcgggtggatcccctgagaccagcagttcaagaccagcctgaccaacactgtgaaaccccgtctctactaaaaatacaaacaattagccaggcgtggtggccggtgcctgtaacctcagttactcgggagactgtgacagaaagatgaaggctgcagagagctgtgatcgcacccctgtactccaacctagatgacagcaagaacctgtctcaaaaaaatagacaaatacataaaataaaatcggagtgaagctaccaatgtaatgttgagtgagtgatatgtttcagaaaatactttctagatccttgatgtttaatacggtatccctagtcatatgtggctatagaaacgtaaactacttaaaactaaataaaatgtagaatctcattcttcagtgacaatagccacagttctactgctcaacagacaattgtggcttgtggttactatattggacagcacagatataaaacatttccatcaatatagaaatttcttttttattctttttttttttttttttttttttgagacggagtcttgctctgtcacccaggctggagtgcagtggggcgatctcggctcactgcaagcttcacctcccaggttcacgccattcttctgcct[175 bp omitted]cccggcccccagtacagaaatttctacagggtaatgcagatctagaatatgatcccattttaaaataaagtccatggccaggcatgttggctgatgcctgtaatcccagcactttgggaggccaatgcaggtggatcacctgaggttaggagttcgagacaagcctggccaacatggtgaaaccccgtctctactaaatctacaaaagttagcttggcatggtgtcgggcacctgtagtcccagctactcaggaggctgaggtgggagaatcacttgaacccaggaggcagaggttgcagtgagctgagatcgcaccattgcactccagcctgggcaacaagagcaaaactctgtctcaataaataaataaataaaataaaataaagtacgtatgtcacatgtgcgtttacatgtgtatatataaatatatttaacaggtttttaatctgttatgtgaattttttaaattttttcatacagtgtcactttattaagtgggtagaaaatg[133 bp omitted]ctcctgcctca[133 bp omitted]caatctgccaaagtgctgagattataggcgtgagccaccacacctgagacacggtttcttaaaacaaaagaaaaaaagagacagggtttcactctgtcacccaggctggagtaaagtagcataatcacggttcactgtagcctcaacatcccagggctcaggtgatcctcccatctcagcctcctgagtagctgggattacaggagcatgccaccacacctggctaatttttgtactttttgtagagatagggtttcaccatgttgcccaggctggtcttgaactcctgggctcaggcaatgcgactgcctcggcctcctcccaaagtgctaggattacaggcatgagtcaccacacctggcataaattattaaatatttaaaattgccaagttccttggagaaactctatttgactacattgtttattttttttaatatgctgcttcataacatctatttatttaaaaatttcttaacatatgatgcagcaactccccttctgggtatatatcagaaagaattgggtcgggcgtggtggctcacgcctgtaatccaagcactttgggaggctaaggcaggaggatcacctgaggtcaggagttcgagaccagccttgccaacatggtgaaaccccatctctactaaaaatacaaaaattagccaggtgtagtggcacacgcctgtaatcccagctactagagaggctgaggcagtagaatcacttgaacccaggaggcggcggttgcagtgagccaagatcacgccattgcactccagcctgggggatagagccagactctgtctcaaaaagaagaaagaaaaggaaggagggagggagggggggaaggaaaggaggaagggagagagggagggaggaggaaggaaaggaggaaggcaggaagggaggaagggagggaggaaggaggaagaaaaggaggaagggaaggaagggaattagaggcgtgagccacagcgcccagcttacattatactttctaacctactaatggcatcaaataaataggaaccggtatttgagaagcacatattataattggaggctgcagtggctcatgcctgtaatcccggcactttgggagacagaggtgggcagatcgcctgagcccaggagttcaagaccagccagggcaatgtggcaaaaccccatctctacaaaaaatccaaaagaattagccaggtgtggtggtatgagcctgtagtcccagctactccggagggtgagatgggaggatcacctagtcacaggaaggtggagactgcagtgagccgtgatctggccagtgcactccagcctgagccacagagggaaggacggaagggaaggaaaagggaacagtgacaaacagagaccagaaacacagagggatgctgaagcataaggaacgaaagacccagagatacagaaatttaggaacacgaagagacccaaagatagtgacagaaacagagagacagaggaaagtctagaaagaaacaatgcagtgacacccagcaccttcatgtatttatttatttacttatttatttattcattcattcatttatttattttttgagttggagtcttgctctgttgcccaggctggagtgcaatggcacgatctcagctcactgcaacctccacctcctggattctcctgtctcagcctcctgagtagctgggattacaggtgtgcaccaccatgcttggctaatttttgtatttttagtagagacaaggtttcaccatgttggccaggctggtgtcaaactcccgaccccaggtgatctgcccacctcggcctcccaaagtgctgggatcacaggcatgagccacctcgcccagccttatttatttatttagagacaaggtctcgctctgtcatccaggctgtagtgcagtggtgcaatcactgctcactgcaaccttaacctcccagggctaagtagtccttctgcctcagcctcccgagtagctgggaccacaggcatgtgccaccacgccaggctaattttttatttttgtagagatgggatctcactatgtttcccaggctggtcttgaattcctgagctcaagccatccttctgccttggcctcccaaagtgttaggattacaggcatgagacaccacgcccgacctcccacatctctctttttttttttttttttttttg[134 bp omitted]ccacgcctggctaattttttatatttttagta[143 bp omitted]tatgtacatatatacacgcatatatatttatatatgtataaataaatacatacatatatatgtgtatatacacgcgcacacacacacacatatatatagaagcttttactttaaagctttgattattgctaagtttattttcattgtctcaagatctgtttaaccctggagccagactgggtcagtgggtctgtgtggtgcctcatgtacctgtctctgccccttgaagttctgtttaccacctccaagaggcatagcctgcagtctcagcaaaaggatagattcccaggaagagtgcgagagaggtttggggcccaggtgggcagcccacccagctgaccccaccaggtgggcatgatatcatgatatcaaatatgctaaatttgtgtctgtgtacatcatgttctggccccagggaaatgagcactttgctggtgaggttggtgacattttgtttaccatctatgcctgaggaggaaagactggaggaaagaaagacctaagaggccagtttatattcacaaacatggaagtcaagcctgttccacctttccaatgcaatagagcacctactgggaaagccatgcctggccagcccctggcaaaacacacctgaggattcattcctccattcacgcaatcataccttcaagaaaagttcagagggcgtggtggctcgcgcctgtaatcccaacagtttgggaagccaaggctggctgatcacctgaggtcaagagttcgagaccagcctggctaacatggtgaaaccccatctctactaaaaatacaaaaattagcctggcattgtggtgcatgcctgtagtcacagctactcgggaggctgaggcaggagaatcacttgaaacttggaggcggaggttgcagtgagctgagatcgagtcactacactccagcctgggtaacagagcgagactccgtctcaaaaaaataaaaagtgtattgagtgtttactgtgtgc[134 bp omitted]aacacagcaagatcccatctctacaaaaaaatttttaaattagccaaacatggtggcacacacctgcagtccccactactcagagtgggaggatcgctcaagtccagaaagtcaaagctgcagcgagctatgatggcattactgtactccaggctgggagacagagcaagatcctgtctccaagacataataataataataataattcacatcctaatggtgttgctggactccagtggggaaagtggtcagtggaattccttagaaggtccacagacctaggaagagacttcaggaactgcaaccaatccctgactctctagggcctgaggaggcacttggatgggaacaccctccacctcccaagagaagcagttgactcctccacgaggaagcactggacagccaggaggtgcctcttgttaaccaaagtgggctgttgaccttgaactccagctcagagatcttgtccctggtcttgttctcaagactcatcaggttctctctttctctggacatggaatctagatcttcaattttgaagccaaatctatgggagtaaaacaaagagatttgattaaaacaaaagatgttgtgcaaaactcaaaaaataaaacaggctgggcgctgtggctcaggcctgtaatcccagcactttggaaggccaaggcaggaggatcacttgagcccaggagttcgagaccagccctggcaacaaacagagactctgtctctacaaaaaatgcaaaaattagcctgatgtggcggtacacgcctgtagtcccagctactcgggaggctgaggtagggggatcccttgagcctgggaggctgaggctgcagtgagccgtgatccagccactgcattccagccagggcaacagagcgagatcctgtctcaaaaaataaaataacagtagtcccagcactttgggaggtcgaggcaagcagatcacttgaggtcaggagttctcaaccagcctggccaacatggtgaaaccccatctctactaaaaatacaaaaattagccaggggtaggggggcacacctgtaatgctagctactggggatgctgaggcatgagaatcacttgaacccgggaggcggagtttgcagtgagccaagatcacgccactgcactccagcctgggcaacagggcgagactccgtctcaaaacaacaacaaaaataaacatgagaagctagatgactgtagctggctgatcacctgcttggcagccacagcttttacctgtgtcttgggcttgggactcatggagcagagtgggtgtcgcccacaggacgcatgaatgcttggagcttactggatccctgcatccctcccatctgtgttcagctcacattcttagtatgtctaacaggtctcatgagttgctttttttttttttttgagacggagtcttgctcagttgcccaggctggagtgcagtggcgcgatctcagctcactgcaacctccgcctcccgggttcaactgattctcctgcctcagccttccgagtagctgggattaccggcgggtgccaccacgcctggctaattttttgtatttttagtagagacaagatttcaccgtgttcgccaggatggtctcgatctcctgacctcatgatccgcctgcctcagcctcccaaagtgctgggattacaggtgtgagccaccacgcccggcttgagttgcttcttaatatccatccttcatttcacctgtctgtgtccttatttatagggctcttgttccctatataacagaattgaaaattccctttaaaaaaatacagcaaatgcacacagaggatcagaggatggaggggagaatttgatgagataaccagggaagtatttagtacaaagcctggcacagagtccatgtgcagtacatgttaattattgtgattatctaaggaaaaataaagag[132 bp omitted]gaaaccttgtctctacaaaaaaaaaaagacaaaaattagctgggcatggtggcacgcgcctgtaatcccagctactcaggaggctgagacacaaggatcacttgaacccaggaggcggaggtggcagcgagccgagatcacaccactgcac[134 bp omitted]ccagcctggcaaacatgatttagtagaaaccccgtctctactaaaaatacaaaaattagctgggcgtggtggcaggcacctgtaatcccagctactcgggaggctcaggcaggagaatcgcttgaacccgggaggcggaggttgcagtgagccgagatcacaccattgtacgctagcctggggggacaagagcgagacttcgtctcaaaaataaataaataaataaacaaataggctgg[138 bp omitted]tggcagacgcctgtagtcccagctactcgggaggctgaggcaggagaatggcgtgaacccgggaggcggagcttgcagtgagccgagatcgcgccactgcactctagcctgggcaacagagcgagactccatctcaaaagtaaaataaaatataataaaataaaataaataaaatacaaacactcccttagtccagggcagggaccagatacagagataccactctaaaggcagacattggtgttggggtttggtgagttggatggcgagtgaacagatggctagtgggaagggaaagagaagaggaaagggttctccatccagtacctggtccccaagttaatgagtggaggatcccagcctgccccaccaggagggaatacatttgcataaggtccctcatctgcatggcatcccagggaatttgcatagagatggcagcctggggccacatcagtatgacccctcctcccaagggttgaaactccagcctacattacaaaggcctagggcaataggaaagtgggaggggtgaacctcaggatctggggctccaggaagtaaagagaagttggtagtaaactacccttgctctttaaccttctgtggttcccagagcatgagccgcccttcagctggcattctggaccttctaagatactgaccctcacatcccctgctcccgctgtcaccaccctcctacctggaatgcccttccccatatcccgtgctgtgacaaagcttgcctattcttcaaagcctggacatcctgaagaattctgaaagctttcaccaccagcccctccttgccctgcccttggaaatttacaaagctctgtgcatctcccagacatgtacagattttttggggtatatagtttattagtaaggttatatttgattgcaaatgactatatatatatatatatatatatatatatatatatatatatatacacacacacacacacacacacacacacacacacatagtctcatacatatatatatatatatagtctatacatatatatatagtctcatatatatatatatgtataccaggagtcatgtctcatgcttgtaatcccagcagtttgggaggccaaggcaggaaaattgcttgagcctaggagttcaagaccagcctgagcaacctagtgagagcctgtctctacaaaaaagtcaaaagatgagtctggcaggccgagcacggtggctcacgactgtaatcccagcactttgggaggcagaggagggcagaccactttaggtcaggagttcaagaccagcctggtaatattgtgaaaccccgtctctaataaaactgcgaacatagccaggcgtcgtggcccaaacctgtagtcccagctacttgggaggctgaggcaggagaatcacttgaacccagggggcagaggttgcagtgagccaaaatcacaccactgcattccagcctgggcaac[140 bp omitted]caaggtgaaaccccatctctac[139 bp omitted]gggcaacagagcaagactccgtttcaaaaaaaaaaaaaaagattattctggcacagtggcgaatgcctatagtcccagccacttgggaggctgaagtgggaggattgcttgagcctgagaggtggaagcttcaatgagccatgattgtaccactgcactccagtctggccaacagagcatgaccctgtctcagaataagagccgggtatggtggctcacgtttgtgattccagcactctgggaggccgaggcaggcaaattgcttgagcccaagagttcaagaccagcctcggcaacaacccaaaaacccatctctacaaaaaaatagaaaaattagccaagcatagtggcacatgcctgtagtcccagctactcgggaagttgacatggaaggatcccgagccagggaggtcatggctgcagtgagccatggtaatgtcaccacactccagcctgagcgacagagtgagaccctgtcttaattaaaaaaaaaaaaaaaagactgaggggaggaagtggttaggggagctgctgctgctgctaaaagaaaggaaaggttgccaggcaggtaaaatacttggcatcagctccatagctccgtcaggaagcctttgcccctacctatgcccctaccttctagtggttatggctcttcagtgaagtgccacctctgggactccttgacactaaaagtcaactccccaggcgggcgtggaacccacccagtcatttgtcaccaaacttggtgctcagcctcatgcttgtgacccaagggtgtgaaactccagcctacacctctggggcatttttttctttctttttttttttttccttttttttttggcagagccttgctgtcacccaggctggagtgcagtggcacaatcttggctcactgcaacctccacctcccgggttcaagcgattctccggcttcagtctcccaagtagctgggattataggcacccgccaccacatcctgctaatttttgtattttcagtagagacagggtttcaccacgtaggccaagctggtctcaaactcctgacctcaggtgatccatctgtctcggcctcccaaagtactgggattacaggcttgagccaccatggccagcctcctggggctttcttcctgggctcatccctgctcacaaagaacagccaggagagagctaagcccactcattcgtaggccaggagaaaggaggtgctagaggccttcctagaagaagacttcctggggactggttcttttgttcaatggataaacgggggtcccaggattttgcaaagcaagttagtagcaaggctggcactaaaacccagaggtcctggtccacaaacctggcctcagattggggagagaaggtcagagagatctaaagcacatttattgccaggcgcgatggctcacacctgtaatcccagcactttgggaggctgaggtgagaggatcacttgagggcaggagttcaagaccagcctgggcaacaaagcg[184 bp omitted]gtggcaggcacctgtagtcccagctactcgagaggc[137 bp omitted]gtagtcccagctactcaggaggctgaggcagaggatcccttgggctgggaagtttgaggttagagggagccaagatctgcactccaacctgggcgacaaagcacaaccctgcctcaaaattaaatacataaataaattaagcacatttatttattttactgttttattttattattatatatattttaagagacggggctctaccatgttgccaggcgtgtcttgaacccctaaattcaagtgatctgccagccttggcctcccaaagtgctgggattgcagacatgagccactgcgcaaggcctatttgtgtatttatttattttagagacaaaatctctctgtctcccaggctggagtgcagtggctcaatcacagctcactgcagcctcaacctccctgggctcaggtgatcctcccacctcggcctcccgagtagctgtagctgctatgcatttattatgtgtgcgcctatttgtccagccatcctcacacccagtttgtgccaagcctgagacacaagctatctggagctcacatggcatggaggttaaaagcacagactggccgggtgcagtagctcacccctgtaatcccagcactttgggaggctaatgcaggcagatcacaaggtcaggagttcgagaccagcctgaccaacatggtgaaagcccgtcactactaaaaatacaaaaattagccgggcgtggtggtgcgtgcctgtaatcccagctactcaggaggctgaggcaggagaatcactcaaacctggggggcggaggttgcagcgagccgagattgattgcgccactgcactccagccttggcaacagagccagactccgtctcaaaaacaaaaagagcacagaccatccgggcccaaaagaagcacccggcctgctatgtgtctttgctgggtggcttggggcaaacaaccaccctgtgcctcagtttacttttcagtgaaatggggatcaccatggtgtccccttcatgggatccctgtgaggaactaactaagagaaataaggtgcttagaagagtcagctctggctctgccattttgtttatttttatttatttttaatttctattttattttatgtttttcagactgagtctcactctgttgcccaggctggagtgcagtggtgcgatctcggctcactgcaacctccaactcccgggttcaagcgattctcctgcctcagcctcccaagtagagacagggtttcaccatgtcggccaggctggtctcgaactcctgaactcaagtgatccacccgcctcagcctcccaaagtgctgggattacaggcgtcagccagggcgccccgccctggctctgccattttgtaactcagtgagtcacttcatctctctgcttcagtttccctatcgcccatggcgctgcatggcttacatgagataatattcgcagtgcacttagatcagtgcctggcacacggtaagtgctgactacatgtattaacagtatcgtaagtgccgggcgcggtggctcacacctgcaatcccagcattttgggaggc[134 bp omitted]gactcaggagaatcgcttgaacccaggaggcagaggttgcagtgagccgagatcgcgccactgccctccagcctgggcgacagagcgagactccgtctcaaagaaaaaaaaaaaaaaaggatcataactaagactcgaatgcggagggataacagcctctgctacttgaaacctagtccttctggggaggaaagcccaggtgtgtggcaggtggaagggagggcgagcctaggtggtcctcttgctagggcaagaagcccccaagcacctgcccccagctgagcagctccgcgcctcctggccctggacgaacttgggcccagactggcgctccgtggcaccccctcccccggcctcccgcttcgcgccctcatcccgccccccggcgcggcctcaccagctccccctgggcagcccaaagaatgcgaagaggtaggtgggggtagggaggagggcgagccgctgggagagacaaagggcccgagtctgagcgagagacacaaagacgcgaggaggctggggagataggggaagtgggacaaggacgcggggagtgaccaggtccggaggccggactggagcccagccccacccagcccggccgggccagcgcagcgcgggggccggtctctgctgccccctggcgggtggctgcggtgagaaggcggcgcggagcaggtgttgggaggggaggaccagggcgcgcagggaggtagggagggaaggaagcagagaacagagcagggacagagagacagcgagagagactcgcacgcagagacaagagacgccgagagggagacacagagaaagagacagggacagagagacacagatagagacagagagagacacacggagagacagagacagagaagcacagagatagagaggcacagagatagagacagagaaacacagagacagagaggcacacagagacagagaggcacagagacaggccgatagagacagagatacacagaaatagagacagagacagagaggcacacagatagagacagagagacacagagacagagtcaaaggatggaaagagacatggggaccaagtgacccagaaacagtgacagacaggccgggcttggtggctcacgcctgtaatcccagcatcttgggaggccgagccgggaggatcgcttgaggccagcctcagcaacatagtgagaccccgccgcccccccgccccgtctcttttattgaaataaagaaacagtgactgacaaaggaagaccagaaacagagcgacaccgaagcatgaggacggaaagacccagagaggcagaaatacagggacagagaggaagacccaaagagagtgagagagacacaaagacacgtaagagagacagagaaatccagaaagaaacgagtgcagcgacacctagagttcggggcagagattagaaacgcacgagggtacgagaaacaggctcagggcgatgggctcgacctgcggggaggtcgcacaaccgggacgtgctgggggcagaaccgtaaagccccacgtgcctcaggcaactgtgatgagaggacccgggcaggcaggaaagggcaggattcgaactgtgggtgggacagaggccaggacggactgagctaagagaccgagagaactccggctagggcgaggggcggggctggtggaggcggggctggtgggggcggagtcggccggaagggccgaaaggggcgtggcaagaccttggcgaggcggccggtaggcagggggcggggcgtgggaactactcgggagcagagggggcgtggctagaccttagggggcgtggtttaacgccgggagcgaaggagacagaattctttggcaggggcgaccttagaatcctggggaggagcgagaatggaatcccggggaggaacaggggtggaatccggggggcggggtcagaacgccaggagggggcggggccggagccagggtcggcttgactcgggggagcagcgggtggatcctgtgacgtcagcgggttcgaaccgccggagctgagcgagaggccgggggtgccgagccgggcggggagagctgggccgggagagcagaacagggaggctagagcgcagcgggaaccggcccggagccggagccggagccccacaggcacctactaaaccgcccagccgatcggcccccacagagtggcccgcgggcctccggccgggcccagtcccctcccgggccctccatggcccgggccgctgccctcctgccgtcgagatcgccgccgacgccgctgctgtggccgctgctgctgctgctgctcctggaaaccggtgagacgagcggacggccccctgccctcgcgcggaccccctccaaccttaccttccgagctggggaagccgagcaccttccccgcccacccccggctccccgagccccctctcgcgtgcccccttcctggctggccccacagactccgaccccctacacgtccgattctctcgaggagactctgacccctcctttctgcatctctctcaccaccacccccatccttcttaatccaattgcccatcctacgcctgcttgtctgtccccctccccatttctcggattcccgcgccgaaagggttaaatcccaggaaggcctggtgccccctccccaccccgcgccgagtagttcacccggatctgggtctctgtctcctctacccctctcaggaatgtggggaatgttccccccacctaccgcagtaaggtctcgaggaagaggcgagaccacctccctcccctatttttccttcttcccggcttgggcgtctgaggcccggagagaactgaggacaagcggacctgattcgggtcccttggagggctaaggataagagttctggcgacttagggggaagggcctgagctcggagctccaaccccgaacctcagggagttgggggttctgactccgtggactccagaaaaattaggggccgggggctccgtcttcagggtccctggtagaatggaggctaggcgctaagtctaactgggatctaggtaaaactgggggcgagagaggatcaaacttgtagcttctggatttaattgtgggcagggggcttcgttttcagggttcccggcagaaccgggggacaggagactcgatctcgtgggcttcagacttaattgtaggcagaggaacgtcttctgagatccaaacagaagtgcgagcagcgggccccgtctcttgggctccagatatgatcaagggtcgaaggctctgtcttgaggctggagtctcagtcgcctgagtcccagatagaacgggaggccccgagtcccagaggctgggagactcctccctttccctatgaatggtcgggggcgacggagacgtcgccggggaagttttcctggtttcactctcgccgagccagggaggggcggggcgggcgctcctggctccgggttccggactccccggtttcgggaccttatctatcctctggtagcgcctttgtcctcagagccatagcaggaggtggacgagtggagccgccgcccttatcccccgtccctcccattgctatgccttggaccccctggcgtccttccatccaccccactaggggaggagagcggcccccctggggagggaggggctgggagggaacccttgaaagaggcgctggccccgccccttgcaggtgacccggttgtgtattcccagcgacaaactctgggatgctagagtttcccgagggtttgcgcagaagagagctcagggggatcttgggggaaccccggccacctctctggcctcatttcccccaggatggctctcactggcctcccagctttgacccagagctgggaactccgcttccatcccctgcctctcccttcaggcagaaataggcagatgagatcagaactggcacctctgggtgaattctccgaacccaccagaccctgagcctactgttagcttggtgcatgatctcaccgaaggctccagcttgccctgggaaacaggtcctgtttctgtttccatcttagagatgaggaaacaggctcagcaaaggcaagcagccttctcaaggtctcacagcaggtcccggggaagccgggctccggttcttcagagccccgcaccgggtgggctccaggaagtgcctctgagtttccatttcctccctcgtaaaaaaactgagataacaatcctttccctgcggaccatccggaaggctcccaggccccactgattccctgtgaaacctcttagcccctggagaaggagctgtcggcccctttcttgaccacccccaccccaatccttcgcctctgctgtccactggctggccggctggcatgtgctcgctctccctctctctctctctcccctccccctccctgttttcctccttccctcactttctttccccctcttcatctctcttcgtttctcaccctttctctctccatccctctccaagctctttctctcttctcctctccccatctctctctctcctctccgtctttctctgtatacctgtctagctccactgcctcccccgcttggcctcctcggggaatgcgggtgcaccacctgggcccccagctgggccggctcccctcccccagctttcttccctgcccatccgtgtgtccatgtccgccaggcagccccacgtagtggagggggaggggagcagagggacggcagcctggctgtctcctctcattagggaagggggactgggcagaggagaagttggggggtgggtatatagagaggctggagctacaaggatgggtacagaggccaatagagggaagcggtcagacacagatttaggaatggggtcagagacacgtgtaggaatggaatcagaggatagaaggggagtgaaatgccggcacagggtcgggggagtgaaataccgacacagggatgaggctgaaagacactggaatgggacggaggagggtgggggaagggagctagacatagataccagatgaaggcagggacaggaaaaggaaaggggtttggtgacaggcagggagccccaaagactccagctgtgggacagcagaggtgccgtgacccacggaggtcagggtacagggggcctcaaggccagcgacatgtgggggccacagggagtgatgaacacagaagggacagggagctgggcacatgggccagctcccccgcccctgcctgggacgctgttacatttttaatgtcccagcagtgctgacaaatggagcaggaaggggaggagaagaggggacccagcaagatgggccaggctgtgagaaggtgtgtcagaaatatggggagacagggcactggagacccaggaggcagggagactccacagtcagagacagaaacagagacgtagaccagaaggcttgtgagaagagaaccccaggaatcaaggcagagagccaggttccagacacagggagacccagacggagaaagagaccggagatgtcagacatacagaggaaagaggaagagagtgactaacggggacagggtatcttctcaggctaatgaaaatgttctataattgctcgggtgatggatggctaactctgaatatacaaaagccactgaactgtacactttaaatgggtagattgtatggtatgggaataatgtctcaataaagctgttacaaagagacagagaatataagaggcacagagcagagaccagagactctgggggacacagataagagtgacagaggccaggcacattggctcataccagtaattccagcactttgggaggctgacgcaggagaatcgtttgaaccgagttcaaggctgcagtgagccctgattgcactactgcactccagcctgggccacagagcaagaccctgtctcaaaagagaaaagagtaacagagaccccaagagagaccctgggaattggagacacagagggacagggaccctaagaactagacacagagagagatagaagaggccccggaagacacagataagagacgctaagagacagcagggataccattaaaagactttcaagaagccaggcatggtgactcatgcctataatcctagcattctgggaggtccaggcaggtgtatcacttgagctcaggagttcgagaccagcctgggcaacacggcgaaaccctgtctctgcaaaaaatttaaaaattagccaaaggtggtggtgtgtgcctatagtcccagctacttggaaggctgaagtgggaggatcacatgagccaggaaggttgaggctgcagtgagctgagatcacaccacagtactccaccctgggcaacaaagcaagatcctatctcaaaaaaacaaaacaaaacacacggattagaggaggccagggggcaggtgcagaaatccaggcacagacagacagccctacatcctggctgctgcagccgctgctcactccctgaaccagctcctggatttccgctgtgggggttgggcactgtgattaatacaattaattaactgacaaggtgactgaggcagcagctgaggccagtactcaaagcctctggccttcaagggccttctctagtcccgacgtgccttgccatgggaggctgggtcgctgtgctttatagatctgcgggggaagccaggccctggggagccagccaggcaggagtccaggagcccagctcctcctcccctagacccaggtgtccagcttcaggccccgcctccctcagacccagaagcccaggccccagcctctcctccctcagacccaggagtccaggccccagccctcttccctcagacccaggagtccaggcccccatccctaatccctcagacctgggagttcaggcccccatccctgctctctcagacccaggagtccaggccaccagtgcttcctccctcagacccaggagtccaggcccccatccttcccctctcagacccaggagtccaggcccttagtccctcctccctcagacccaggggtccagcctcagtcccctgctccctcagacccaggagcccaggccccctgctcttcctccctcaaacctgggagtctaggcctccagctcctcctccctcagacccaggaatccaggcccccagccccctcctttctcagacccaggagtccaagcccccaacctctcctccagggttccataggtcactctgcaccctcctcgctgccttggtctacccatccctggatctcggggtctcaagctgtgtctgtccccattgttctcccatgggctcacactacaccctgggcagcctccactctgccaccacaggaagcctgcaggtgcagtccacagggagaggaagtgtgtctggggacccagctcacacttcatgaagctgtcaccagtctggcttgcccagtgacactgagggaggctggtgttcccatggccacagtcccctggctatggtgctggccatgtcctggccaagttcatggcacagcccctgcctagcagtgtgctggatgatgggggctcactccaggctgaccaacctcctggctgtatctcccttgcctccacctgacatgcagagcgtctgggcagcggccctcacccctgtcccctttacctccgcagccctgtcagcctccaagtcccaaccctcccagcttctccctgtcacccccaccgctggtcctgctttcccattccaagttctgagtgtgtttccaatctcgccatcctccgtccccacagccccgaccctgatcccggcgcctccccccgagacccctgccccactgagggctctttcttttttcttttttttctttttttgagacaagagtctcactctgttgcccaagctggcaatagtgtctcactctctcactctgtcttccaagctggtacagtggtgtgatcttggctcactgcaacctccgcctcccaggttcaagcaattcttgtgcctcagcctcccaagtagtggggattacaggcaggtgccaccatgcccagctaatttttgtatttttagtagagacgggctctcaccgtgttgcccaggctggtctcctgagctcaggtgagccactgcacccagcctgtgagggttttttctttctctttttgttttttttgttttttttttgagacatggtagccaccacctgtaatcccagctactcaggaggctgaggcaggagcccgagacagagcaagactccgtctcaaaaaaaaaaaaaaacagaaaagacttgggcttgtttcctgagggctctgtgcagaggagggcgtgttctgcactttctagcaggatccttctagctgtgcataggaacaaaccacaaggacaactgcagtcctccaggtgggaagtggcagtggattagaccagggcagggactggggaggcgtcagaggtggtctaactagataaatgtcaaagaaggaggtgacagggtttcctgatagattgcttatgaggtgagagagaaagaggtgaaaatgccttaaaaatggactgtaggcaggacgcggtggctcacgcctgtaatccaagcactttgggaggccaaggcaagaggatcgctttagttcaggagtttgagaacagcctaggcaacaaacagtgagaccccttctctacaaaaaaaaattttttttaattagtcaagtatggtggtgcccgcctgtagtcccaactactgagaaggctgaggtggtaggattgcttgaacccaagaggttgaggctgcggcaagctgggatcctgcactccaccctgagcaacggagtgagatcctatcccagaaaaaaaaaaaaggaatgttaaccccacagggcctgaactatcctattcattcatttggaattagaaattcagaatggggaacttacagcaatgggattttttttttcagacggagtctccctctgtccccccagctggagtgcagtggcgcgatctcagctcactgcaagctctgcctcccagattcacgccattctcctgcctcagcctcccgagtagctgggactacaggggcctgccaccacgcccagctaatttttatatttttaatagagacgtggtttcaccgtgttagccaggatggtctcaatctcctgacctcgtgatctgcctgccttggcctcccaaagtgctgggtttacaggcgtgagccaccacagctggccctttttttttttgagatggagtctcactctgtcccccaggctggagtgcagtgctgcaatctcagctcactacaacctccgcctgctaggttcaagtgattctcctgcctc[134 bp omitted]gcctcccaaagtgttggaattacaggcgtgagccattgcgcccagggattttagaacctcattcattcgttattcagcaagtactgagcatctactaggtaccaatctctcttgcagatactgagggtacaggttgtgagcaaaacagacagaagatccctgccctcgtggcgctggcagtcagtttccaggaggatgtgatatatctagtgtgtgagatggtgagaagcactatgcagacagagaacgtaacagggcaaaagggcggaagagcagtcaaccagggaggggagaggaggtggcagctgaggtggagtatctcggggtaaaagaaccccccgaggagtgtgccccacaagaagctaaaagtggtgggtttgtttgagaccgagtcctcactctgtcacccaggctggagtgcagtggcgcaatctcagctcactgcaacctccacctcctgagttcaagcgactctccctaaagtagctggaattacaggcatgcagctaatttttgtatatttagtagagacagggtttcactgtgtcggccaggctggtctcgaactcctggcctcaagtgatccatccaccttggtctcccaaagttctgggattacaggcttgagccaccgccccatcctaaagtcggtttttttgttttaatcctccaaatccagtagtgctcagatgccatcctaaatggaggattggaggggagcctcccttagaaggaagatctgggcccctggaagccacaggactgctccttaagtcaagaactctgaatctggccaggtgcagtggcttatgcctataatcccaacactttgggaggccgaggcgggtggatcacttgaggtcaggagtccgagactagcctggctgacatggcgaaaccccatctctactaaaattacaaaaattagctgggtatggtggtacatgcctgtaatcccagctacttgggaggctgagacaggagaatcacttgagctggggaggcggaggctgtagtgagcccagattgcgccactgcactccagcccgggcaacagagtga[183 bp omitted]gcgggcacctgtagtcccagctactcgggaggctgaggcaggagaatggggtgaacccgggaggcggaggttgcagtgagccgagatcgcgctgctgcactccagcctgggtgacagagcaagactccgtctcaaaaaaaaaaaaaagaactctgagtcagcctggc[174 bp omitted]gaggcaggagaatggcatgaacctgggaggcggaggttgcagtgagccgagatagtggcactgcactccagcctgggcgaaagagtgagaatctgtctcaaaaaaaaaagaaaaaaactctgaatcccagagacccagggacttggaggaggtgaagggtgtggggctccagggacctggggctcagcttttcaggtctcctcctccaggaagctcttctttcgttcatcgtccctccctccttcagacaggtcaagcctcttcaggttcctcccataccacccctactccgtcttccaggcattcttggtgataattatttgtgcaatatttgtaccccctgcaatctggatgtcaaccctggaaaacaagcacctgatttgtcctgttacttctgcagcatccacacttagcaacattcattcacttggcagtgtttactgagcacctactacatgctaggccctgttgtaggtgctggggatacagtaggggaaaaacacagacaaacctcagggctggagagggcagaccctctagcacccaggacctgtttgttgagtaactatttgttttttggatttgacctataagatgtgaaagaacagccagattcttccaggttctgccttttcctgatccctccctctctccctactaccaaatcccttccattttaaaattttaaatcctggtggggcacagtggctcacgcctataatcccagcagtttgggaggctaaggtaggcagatcacctgaggtcgggagttcgaggccagcctggccaagatggtgaaaccctgtctctactcaaaatacaaaaattagctgagtgtggtgacatatgcctgtaatcccagctactcgggaggttgaggcagaattgcttgaacccagaggcagaggttgcagggagccaagatggcgccactacactctggcctgggtgatacagcgagaatgtgtttcaaaaaaataaaatcctaagacctattagcctcctccccaacactcagtctcagtcttaacctcttgttcttttcattgccaactttttgtgtcattttgctgtctggtcatctatctctgctcagcccaccaccttcccctcaggcctccttggatgaagttaagtcattctctatttgaagaacccgcaacggctcccacttgccacaaagaggaaactaacttcctcggccccagcctactttgctgtctctgcagttcacacaggcccaaatggctttccttgaccctcattgagtggccttccccccttgcctagctaggaaggggccagagcgcttaaccaccctgatcccaaccttagtgcctttgggggccaggcgggtgataagtcccagcacctggggaatctggaggagccggaagggagtgtgccttgtgggaggggggtgatgtccttcctcagccccacccagctgttgcccccaggagccacatatccggacttctgtctggagctttagacagcaatctccaggccttctgtgtgggctgctacttcccaactgaaataacactctgtgggccaaagcaaacatgcaccacagtcagatctggcctgcagcaggcggctgacccctgctgctctgctcacctgggccacgccccgtgaacatcccccatgagcaagtccttccctggaactggcacaagggaccctggagggtggctgaaacatccccattttacagatggaggaagttgggcttggagacaaggctgccagctggaaagggtgtcagcgttaaataacaagattcagaaaataggattaagtatagagtttattcaagcctaaagcttgaggatggccaccccggagtgtggattcaagttgccccaaataaaccctttgactagctgtgattacaagtggactttttttttttttttttgagacagggtctcaccctgtcactcagtctggagtgcagtgtgtgatcatggctcactgcagcgtcagtttctcgggctcctggccttgagtgattctcctgccacagcctccctagtagctgggactacaggccctagccatcttgcccagctattttttttttttgagacggagtcttgctctattgcccaggctggagtgtagtggcacaatctctgctcactgcaacctccacctcccgggttcaagcaatcctcctgcctcagcccccctagcagctaggattacaggcacctgccaccatgcccgggtaatgtttatttttttagtagagatgggatttcgccat[136 bp omitted]actatattgtccaggctggtctcaaactcctggcctcaagtgatcctccacccacttcggcctcccatagtgctgggattacaggcatgagccaacgcacccagtctgcaagtggatttttaaggaacaaagaagagagagttcctaaattgttaccaagaatttacattgaaacagcataaggtatctgcaggtctggctcagaaaaaaagataacagaaggtattgattggctatgcactgtttattgtatcacaaattccaggaacaagaagctaatggggagggcagctgtgcaggaaccactgcctcgggcatgggtggaggaggcgtgtgaccgaagtcccctattcactgtacagtctccctgggcctgatacatttcgcatagctcagactgatctgagctatttttcttttctcaagttgggtgggggtggcccctctggactggaaaagcctcatttttcccccaagtgacacacctgagtttgtttgacttgtttcccccaagtgacacacctgagtttgtgggacttgtgtggagatgatgtatttatgtcacacttcagtcttcgctgatggcttttttttttatatttatttacattttttcttttaaggtaggcagggcctcattctatcgcccatgttggagtgcagtggcgaggtctctgggttcaagtgattccccttcctcagcctcccaagtagctgggaatacaggggcccgccaccacgcccagctaatttttgtatttttggtagagacggggttt[135 bp omitted]ccctcccgagaccgagtctctctctgtcacccaggctggagtgcagtggtatgatctcagcttactgcaacctccacctcccgggttcaagcaattctcccaccttagcctcctgagtagctgggattacaggtgcctgccaccacacccagataatttttctatttttagtagagatggggtttt[132 bp omitted]ttgctataatttactgatgatttcttacccaaagatcctcggcctgtccccacccaaggggactgccttccaccggggacccctcataagagttactcattaggatggtgttccctggggttcctgtgtgtatgacgccagggcctgtgcaccgcctccatggcccatctccatcagacagagctgggcagtggtgttggccctcgaaatgaggcttgtgccctggcctttcctggcctgggggctgagtgccaaggccacctgtaattaaactgagcttcctatgtttacttagcaagcactgacctctcatttcctggggccctatgctgagtgttccacagctattctttaatctttaaacagcccttgggacgcaggcactattattaacctcacatcacagctggggaaactgaggcacagagaggttaagtggcctgcacaaggtcgcagagccaggattcaaacccatgaactatgggccactcagtcgccatgctgtactgccgtgcacagcagaggaagatt[137 bp omitted]atggtgaactctggtctctactaaaaattcaaaaatcagccggaccgtagtggctcgcacctgtaatcccagctactcaggaggctgaggcaggagaatcgcttgaacccaggaggcagaggttgcagtgagttgagaccgtgccactgcactccaacctgggtgacagagcaagactccgtctccaaaaaaaaaaaaaaaaggtgagaaaccacttaggctggctgagaactgcaaacatgcgtccacataaaaacttgaacttgcatgatcccagcagctttatttatcagagccaaaaagttgaaacaacctcaatgcctatcagcggctgaatggataaacaaaatgtggtccgtccatgtagtggaatattattgagccttaaagaagagtgaagcgccgacacgtgttacagatggatgaacctggaaaacaagatgccaagtgaaagaagccagacacaaaggctacatagtctattacatgaaatgtccagaacaggcacatcaacagagacagaaagttgcatcgtggctgggggaatgggaagtgactgcttaatggataagggggttacttagggaattataaaaatgcccaggctgggcgcagtggctcatgcccgtaatccgaacactttgggaggccgaggcaggtggatcgcttgagctcaggagcctaagcaacatgatgaatccccatctctacaaaaaatacaaaattagctgggtttggtggctcgcacctgtagtctcagctacttggggggctgaggtgggaggatcacttcggccccagagacggtttgcagtgagcagaaatcgcgccattgcacgccagcatggacagagtgagatcctgtctcaaaaaataataccttaaaactgattatagtaacagatgtaaaactccaaatatacttaaagccactgaattgtactgtattttttattttacttttttataaaaaaattatatatatatattgttttttcttttcttttcttttttcaagacagagtctcactttatcacccaagctggagtgcagaggcgcgatctcggctcactgcaacctccgcctcctgggttcaagtgaacacgtccggctaatttttatatttttagtagagacagggtatttcaccgtgttggccaggctggtctcaaactcctgacctcaagtggcccacccacctcggtctcccaaagtgctggaattacaggtgtgagccactgcacccagccttaattgtatactttaaatgggtgaattgtgtagcgtaagaatttatatctcgataaagctgtttaaaaaaaaaaaaaactacgtaaaaaatgagcaaaggacccgaagagacatttttctaaagaagacatacaggcagccaacaaacatgaaaaaatgctcaacatcattaatcatcagagaaatgcaaatttaaaccacaatgaggtgccatctcacctcagtcagaatgtctgttactaaaaagtctaaaaaaacagatgctggcaaggatttggagtaaagggaccgcttacccactgttgatgggaatgtaaattagtacagcctctatggcaaacagcatggagatttctcaaagaactaaaaatagaactaccatttggtccagtattccactgagtatcctcccaaaggaaaagacatcattatatcaaaaagacacctgcgcttgtatgtttattgcagcactatccacaacagcaaagatatggaatcaacttaagtgtccatcgatgaatggaggattggataaagaaaatgtggtctatatctacaaagatttcatgacgaaattgccaaaagcagtgcagcaaaagcaaacattgacaaatgggatctaattaaactaaaaagcttctgcacagcaaaagaaactatcctcagagtgaacagacaacctacagagtgggagaacatttttgcaatctatccatctgacaaaggtctaacatccagaacctacaaggaatttaaacaaatttacaagaaaagaaaaacctaaaaaagtgggcaaaggacacgaacagacacttctcaaaataagacagtcatgcagccaacaaacatgaaaaaaatgctcaacatcactgatcgttgagaaatgcaaatcaaaacaatgagataccatctcacaccagtcaaaatggccattatcagaaagtcaagaaacaacagatgcaggcaaggttgtggagaaataggaatgcttttacactgttggtgggaatgtaaattagttgaactattatgaagacagtatggcgattcctcaaagatctagaaccagaaataccatttgacccagcaatcccattactggtatatacccaaaagaatataaatcattctattacaaagatacatgtatgcgtatgttcattgcaggactattcacaataccaaagacatggactcaatccaaatgcccatcatggatagactggataaagaaaatgtacaggccgggcactgtggctgacgcctgtaatcctagcactttgagaggc[135 bp omitted]gaggcaggagaatggtgtgaacccaggaggcagagcttgcagtgagccgagatggcaccactgcactcaggcctgggcaaaagagtgagactccgtctcaaaaaaaaaaaagaaaagaaaaaagaaacctgcacatgtatcctggaacaataaaaaaaaaaaagaaagaaaatgtggtatatgtctaccatggaatactacacagccataaaaaaggatgggatcatgtcttttgcaccaacacggatggaactggaggccattatcctgagtaaaatagaaagtcaaataccacatgttctcacttataagtggaatctaaacagcagatacacaaagattggaataatggacagtggagactacaaaaggtgggagggagggaaacaggtgagggttgaaaaattaactgttggaggctgggcacagtggcgcacacctataatcccagcactttgggaggccgacacgggtggatcacgaggtcaggcgttcgaggccagcctggcc[225 bp omitted]actcgggaggctgaggcaggagaattgcttgaaattgggaggtggaggttgcagtgagccgagatcacaccactgcactccggcctgggcaacagtgcgagagtctgtctcaaaaaaaagaaaaattgactgttggaagccaggtgcattggtgcatgcctataatcccagcactttgggaggctgaggcgggctgctcactttgagttcaggagtttgagaccagcctgggcaacatggcaaaaccctatctctacaaaaacaaaaattagccgggcactggtggcacatgcctgcagtcccagccactcaagttgcagtgagccaagattgtgccactgcacttcagcctgggagacagagtgagaccctgtctcaaaaaagaaaaagaaaaattaactgttgggtacgctgtttgctattcaggtgatagatatgctaaaagcccagacttcacctctatgcaatatatgtatgtaagaaactggcacttgcacctgctaaaaatataataattttaaaatttttattttaataaaaaaatagaaacttagggccaaggggggagctgatcatttgaggtcaggagttcgagaccagcctggccaacgtggtgaaagcccatctctactaaaaatacaaaaattagccaggcatggtggcgggcgcctgtaatcccagctactcaggaggctgaggcacaagaatcccttgaaccagggatggaggttgcagtgaccaagattgctccactgcaccccagcctgggcaacagagcgagactcagtctcaaaaaaaaaaaagaaacttgagaaaaaatgctatgtaggaggtctgtaggtttcataggaaggtgagagaaagtatattactgaggggggatgaagacaatactcagcctttaaatgttttaaaatgtattttatgaaagtttttttttattgatttattttcagaggattccccccccccaaaaaaaaatcttatgaaaattttggggtgggctgggtacagtggctcacgcctataatcccagcactttgagaggctgaggtgggaggatcacttgagtccaggagttcaagaccagcctgggcaacatagcgagacattgtctctaccaaaacaaacaaacaaaaaatacaaattagccaggtgtggtggtacatgcctgtagtcccagcttgaacctgggaggtcaaggctgcagtgagctgggtggcccactgcactctagcctgggtgaaagtgaggccctgtctgagaaaaaaaatgtagttgaaagaaaagaaaacttttatttttttattttcttttttaattttaaaggcagggtctcactctgttgcccaggctgttcttgaactcctaggctcaagcattcctcccaccttggcctcccaaagtgctgagattgaagtcttgagccactaccctggccatcat[139 bp omitted]cagtgaaaccccatctctactaaaaatacaaaaaagaaaaaaattagccaggcatggtggcaggcgcctgtagtcccaggtactcaggaggctgaggcaggagaatggcgtgaacccaggaggcggagcttgcagtgagccgagatcgcgccactgcactccagcctggtcaacagagcaagactccgtctcaaaaaaaaaaagaagaatggcctggagcctccctcaccttctccacctagacccacttgacaatgggtgacatattttggtttttgctgaaccatttaggagtaacttgagatcatgacattgcgacttcatatcttctgggaaaaatagtgtgtgcacagccacaatttaattatcacacctcggaacatgaacagcaattccaaaatcatatgtaatatgaactcatagtacacgttatagttgtataatagaatagtcattttagtcttccctaaaatgtcttttccaggtggcttttttggaatcaggatgctgcgaagctgcctacgttgcatgcggagcctgcatttcccgtggggcccccttcgtggtggccctgcctggaggtgtctgggtccctcccccacccgactacttcactctctgtcctctctgcccaggagcccaggatgtgcgagttcaagtgctacccgaggtgcgaggccagctcgggggcaccgtggagctgccgtgccacctgctgccacctgttcctggactgtacatctccctggtgacctggcagcgcccagatgcacctgcgaaccaccagaatgtggccgccttccaccctaagatgggtcccagcttccccagcccgaagcctggcagcgagcggctgtccttcgtctctgccaagcagagcactgggcaagacacagaggcagagctccaggacgccacgctggccctccacgggctcacggtggaggacgagggcaactacacttgcgagtttgccaccttccccaaggggtccgtccgagggatgacctggctcagagtcataggtgagcagggtaagggcgggaggcaaggaggtgggagggccgcggtgtgggagcatccccttgcgggtcagtttctctcttggcttcagctgtgaggttcacattctctgtgggtttccatccatcagcaaatgttcattaagcacctaccgcgtgccagatgcttttctgtgtgctgaggatgtggcaggcaaccaggcattcttgggaaaaacaaaaaaataagtattggctgggcgcagtggcccacccctgtaatcctagcactttggaaggccgagatgggcagatcgcctgaggtcaggagttcaagaccagcctggccaacatggtgaaaccctgtctctacgaaaaataaaaaattagctgggtgtggtggcccgtgcctataatcccagatactcaggaggctgagtcaggagaatcgcttgaacccaggaggcagaggttgcagtgagccgagattgtgccaccactgcactctagtctgggtgacagagcaagactcggtctaaaaaaaaaaaaagtattgaggttgggtgtggtggctcacgactataatccaagcactttgggaggctgaggcaggtagattgcttgagcccatggtggtgcgcagatgtggtcccagctacttgggaggctgaggtgggaggatcgcttgagaccaggaatttgaggctgcggtgagctgtgatcatgccactacactctagcctgggtgacagagtgaggccctatctctaataaataaataaaagagtaagtcaggcagttaaaggggccatggaagttggagagggccaagttgcaattctagctaaggaggtctggggatatttaggcagaaactaggagaggaggagccctctgggtatctaagggaagagcgttccaggcagacggaatggcaagtacaaaggccctgagacaggaatacctggagtatttgagggccaggaaggaagtcagggtggctggagacatatgagtgggggaaagtaggaagcaataaagtcaaggagaggatggggacagattggcaaaagccttgtggactataagaagcctttggcttttgcccagggaggataagagctgtagtaggttcttagcagcagacaggtttgatctggcttgggttctcaccagctcctcctggctgtgttgggaggggaaagaatgggagctgagaaaccacagggtaaggcaactacaaagtccgggtggggccgggtgctgtggctcacgcccataaccccagcactcagggaggccgaggtgggaggatcccttgagcctaggaatttgagaccatcctaggcaacatagtaagactcttgtctcaatgacaaaaaaaattttttttttttttgagacagagttttgctcttgttacccaggctgtagtggagtggcgcgatctcggctcactgcaacctccgcctcccaggttcaaccaattctcctgcctcagcctcccaagtagctgggattacaggctcccaccaccacacctagctaaatttttttgtatttttagtagagacggggttgcaccatgttggccaggctggtcttgaactcccgacctcaggtgatccgtccacctgggcctctcaaagtgctgggattataggcatgagccactgagcctggccaggaaagaaaaaaaaattgttttaattaaccaggctcagtgacttacctgtaatttcagctactcgagagactgaggtgggaggatcacctgagcccaggaggttgaggctgcagtgagctgtgattgtgctactgcactccatcctggacaagagagcgagaccctgtcttaaaacaagtccagtccgggcaggaagtaaaacggcttagaagtaggggacatagtggcctcattgagataggatgtgcagggaaggcgtcttagtcaagtcctggagtctgagaaggagctacctttgggcatagcagaggggcacgggcacagaaacctgggaggtgggcatgagatgggagctgggcgcgttccaggaatggaaagggggctggtgaggataggcaagggcttgggtgaccctcagcggggccacattacacgggcttcacaggtggaggcgaggaggctggactatgccctcagcatggttaagagccatgggaggtgtcaagccacaggagagatctggacaaacgtttgaggttgcaaaaaatgaccggcagcagtatgaggagtgattggaggagtggacggaggtagaagggagctgggacgagaggggagaagaggcattgctgggaagacggatgaggcagtggggggcagagggaagcgggcggcatatagtggtgtttttagaagatagtaggtgctggg[135 bp omitted]ctgggcaacatggtgaggccccatctctacaagaaaaaaaaaaattagctgggcatggtagcacacacctgtagtcccagctacccaagaggctgaggtgggaggatcgcttgggcctgggaagcagagattgcaagtgagccaagattgcaccactgcactccagcacgagaccctgtctcaaaaaaaaaaaaaaaaaaataggactcccagcgggaaggtgactgatacttggcaaaaatagagaaggcagggaagattttttttgaaggatgcttttttttcttttcctttttctttttttttttttttctttttttgagacaaagtctcactacattgtccaggctagactcgaactcctgggctcaggggatcctcctacctccgcctcctgcatagctgggattacaggcatgagtcaccacatcca[135 bp omitted]cccatctctactaaaaatacaagaaattagccaggcgtggtggcgggtgccttagtcccagctactcgggagattgaggcaggagaatggcttgaacccgggaggcggagcttgcagtgagccgagatcgcgccactatactccagcctgggcgacagagtgagactctgtctggaaaaaaaaaaaaatatgttggaagtcccctgggagcccaccttccctaggcaacttcccagaagccacgtcactctggatgccttttcttcccccttctcagcccagagcgtctgagaaggtcaccctgtgctatccttgagtaaacacttccctttccagtaacacatgaaaccacagccgttttccataatacaaaggacagctcttctcctccccaccctcacaaacgcctctcttcttgtgcaatcatttgttctcatccagagataacttcagggctgggcacggtggctcacacctgtaatcccagcactttgggaggctgagaggcaacaagagcaaaactctgtctcaaaa[142 bp omitted]aaccctgtctctactaaaaatacaaaaaaattagccgggcgtggtggcgggtgcctgtagtcccagctacttgggaggctgaggcagg[135 bp omitted]tttaatcaagcccaaagcttgaggatgaccacctgggagcatagattgaagttgccctgaatatacacttcaagcaggggccaaggcaagcagctcttgcaagtgagcttttgtttgtttgtttgtttcttggagagagggtctccaaaactacaaataaaaattagctaggaatggtggcgcacacctgtaatcccagctactcaggaggctaaggcaggcgaattgctgaaaccagcaagggcaggttgcagtaagctgagattgcaccactgcactgcatcctgggtgacagcaagactctgtctcaaattaataaaaaaaaaagagagagagagagataacctcaagagcttccgtatacacactggtgcagaagtaaggaacaaaacagccaaagcctctgtcttcatgatgcgtgagccaccaaggaatagttggccagagtcggcggtcaggaaagtgcccttgacgaagtggggcttggagtggggtctggagaaggaggccaaagcaatccaggcacaaaatcaccaaccaaaaccccaaagtgggtggaggcagagactgaggagggcgtggatggggagcatgtggagtggccaggggaggtggccatggggaagtggtgggctcgggccctgagtcactattctaacagcttggagggcggccaggaggatgtggggaggcttgttggatgctccacgatggtcaggggagaaggcggtgggaagggagagctgggaagaagaggagagtcagaccgtgttgagaagttcagaggtggatacccaggtccagaaagcaacagaagatgtgagtctgggtgggggacacacatcataagcatgagctgctattcttcctggagttttgtttttgtgatttttttccatgttttccaagagaatgaggtggaaagggtataaaaaaaagaaacggctttgagattttctgcctttatcacacttccagtcattcaatcatctaatggtgattacaggaaaaggaacagggggcctttccagctggacctttgaaccacagtactcagttactcgctcggccttgatttgctttttttttttccttttttttttttttcttttggagacagagtctcactgtcacccaggctggagtgcagtggcacgatctcggctcactacaacctctgcctcccaggttcaagcaattctcttacctcagcctcccgagtacctgggattacaggcacctgccaccacgcccagctaatttttgcatttttagtagagatggggtttcaccacgttggccacgctagtctagaactcctgacctcaggtgatctgcccacctgggcctcccaaagtgctgggattacaggcatgagccactgcgcccatcctaatttttgtattttcagtagagatgagttttcaccatgttggccagactggtctcaaattcctggcctcaagtgatccaccctcctcagcctcctaaagtgctggtattgcaggtgtgaaccaccacgcccgaccagcttttttttaaatctcagcctcctctaggcttttggaccctgtctctgcatctctggcagggcgaagagacagtataccgaaatggccaggccaggcgcctgtaacctcagagctttggggagccgaggtgggaagatggcttgtgctcaggagtttgagatcagcctgggcaacatagcaagaactcatctctacaaaaaaatttaaaaattagccgggcatggtggtgcatgcctatggtcctagctactctggaggccaaggcgggaggatcacttgagcctaggaggtgcaggctgcagcaagctatgatcacaccactgcactcgagaccaggtgacagagcgggcccctgtctctaaaaaataaataaagtaaaataaaatgggcaacacttggatagggcagtgcaggccagacattaccctaagccatttacctatcaatgtattatttaattcacacagcaatcctaggggtgggtactttcattatccccattttacaaaacaagaaacagctacagagttgcaaaaccacttatcccaagccaggccgctgataagcagcagagctgggattggaaccccggcagttagggcctaaccaccctgctcctctgctgagtgtttgttgaatgactgccggtgaggagtgacgcaccccctctcctcctctccccagccaagcccaagaaccaagctgaggcccagaaggtcacgttcagccaggaccctacgacagtggccctctgcatctccaaagagggccgcccacctgcccggatctcctggctctcatccctggactgggaagccaaagagactcaggtgtcagggaccctggccggaactgtcactgtcaccagccgcttcaccttggtgccctcgggccgagcagatggtgtcacggtcacctgcaaagtggagcatgagagcttcgaggaaccagccctgatacctgtgaccctctctgtacgctgtgagtgtatcgggggtgacccctcccccatcaaaactgcctacactggcttctctaaagcactgtctacattgtctctgaatgttgtctacgtgggttccctgaagccaaattctgcactaccttcctgccattgtctacactggctcccatgggcaaatctacatacttccccctcattgtctacattggctttactgggttcctgcatgctgtgcctagtctgtggtaacctgggatgggcttgcaagagccagtttgatacatttctttccaattccacatccaatgaagtcttctcggtagcttgaaatcaaccttggggaatatttacaccaaggaaattggcaaaccctagaaatgggggcttcttttattccccagagagttggtttaccagcaaagagctgcccccaacagtgtcttttctggctcccatggaccccggttgacactgcccctggaccgttagatcaatcatgctgggccatgtccacatgtctacatgtctacactgcccaacctaacatcgtctccacaccttcccatacttctgccttgacttccctaggtgccatctatactgagtctcccagagtctctacaccgacccctgatccttgatattatttacattgtatttattatttattatttattattatatttttatatattatatattatataaaatatataaattatatattatatattaacatatattttgtcattatttattattgttatttaatataatataattacattatattatatattacattacaggctccaccccccgggccctgttgatcctgacccctcccactgggttttttgctagctcttccagaaactgcctatactcacacctcgtaatgttacccagagaggccaccctggcactcttcacacagaatccctcaaatactggcttaaccacctcttccaccactgtccaaaatgaccacatatcccaactcaatgttgtctacactagctccccaggcaatgcctccacttacacagattccctaagccaagtctacaccagctcccccaggcaacatgcatcacgtgcgcccataagtgcaacagctcccctgagcctcgtctgtgccactttcctcccgggacctacactggttgcccaaaccctgttttgacatcctccctccatgccaaaaacacacacacaggccgggtgcggtggctcacacctgcaatcccagcactttgggaggccaaggcgggcagatcacttgaggtcaggagttcgggactagcctgggcaacatggtgaaaccctgtctgtactaaaaataccaaaattagctggacgtggtggtacatgcctgtaatcccagccatttgggaggctgaggcggagggatggcttgagcccaggacgtggagtttgcagtaaaccaggatcaccccactgctctccatcctgggcaacagagcaagatcctgtctcaaaaacacacacacacacacacacacattatttgtagtggctcccttaggcactgccagcactgaacaataactcccacaaaattatccacagtggtttccctgaacagtgtctacactgacatcagcacacaacagcctggactgatttgccccagacagttttgactgctgtacctcctgccaacccgccccgtttctttagcattcctgtctatctgctaacttgtccacccgctctgggattctcctccttgctgatccagtccccccatttcccccagaccctcctgaagtgtccatctccggctatgatgacaactggtacctcggccgtactgatgccaccctgagctgtgacgtccgcagcaacccagagcccacgggctatgactggagcacgtgagtcacgtggtctcagaaccctgggtctgagggaggcggggctgggggcctggactcctggatctaagggaggaggggctgggggcctggactcctggatctgagggaggaggggctgggcctaaattcctaagtcctccaggatgaagggagcttgcattttggcaatttggggtctccgggagtacttaggtccctggagcttggctcctggtgggtgtatctttagggatgaggcctgtgctcccctctcgaccttggtatccctctcacctgaccccacacccctccaggacctcaggcaccttcccgacctccgcagtggcccagggctcccagctggtcatccacgcagtggacagtctgttcaataccaccttcgtctgcacagtcaccaatgccgtgggcatgggccgcgctgagcaggtcatctttgtccgaggtgagtgggtcttgggggccgtgtgtggagacctgggtccgctcccctggagttctgcccttcaggacttggggctgcactgggggaggctgcgccgccgacctgggagggatgcagacctgcctggctgaggggagatgagggttggccttcccctcgtggcctcagactggggtctggatttggggtgtcggggtaggtgaaggcagcagagttggggggttgaggactttgctcggggttcctagaaagtagaggcctgggtagggtcctcacgaatagacccgaggaagctgccctgggctccagctcctgagaaagacgcacacctagagtcaggcatgcaaacttcaaagagacagaaaccaagagctcccacccccagaaacacaatccggccccaaggcacggagccaaagaggaaaagcacaaagccagaccatcacccagtgatggaaactgggtcaaactcacaactgcagggccacacacctagagcgcggccgggactgttaacagagccatgcttcctgggacagagagacccctgggtcctggagatagggccagagacccctcctgtcagagccacagctggcaggatccacagccacagacactccctgtgctgagaaattctgttgcagagatgcatcagaatccagacactcacctggatggtaaccctgcacgctcaaacccattgtcaccaagacacacacccaggaggacagtggcaccagccaagatagactgaacgaagccagatgacacctggaaagggacattctttttttttttttttgagatggagtctcgctctgtcgcccaggctgaagtgtagtggcgcaatctcagctcaccgcaacctccgcctcccgggttcaagcaattatcctgcctcagcctcctgagtagctgggactatatgcgctcaccaccaaacccggctaagttttgtatttttagtagagacagggtttcaccatattggtcaggctggtctcgaactgctgacctcaggtgatccacccgcctcggcctcacgaagtgctgggattatatgcatgagccactgcgcctggccagaaaaagacattcttagaaacacgccagggcgacggtccatgcagcacacctgtgcaaacacgcaatgtgcaggccccccagaaacatgactgaaggtgtagggacaaactcccagacaggggctgtccctgtcatgcagacagactagccacggagggacagaagcagacccccttactgagtcataatcttagaatgcacacacacttgcagggacacccgagggaaaacagacacctcttcaggaatccagatacagccagggagataggacacccctacgggaaacactgtcacagacagcaaacccagagagacagctgtcccgctctgggctcgcctggcgcgtgaggatgcacataagtccccggaggaagacgtcacacagacacgctgggggcaaaactaatccaggacagcaacggctgcacacggaggaatgtcatccctcactcacagaccctcagacggaaaatcaaagacatcctgggaggagcttcttcccaggaaccctcccgaaactccccgaaactcctccgaaattatccagaaagtccgttagggagattctcattcaacaaatatgtgtttcctgtttgctaggcactcttgctgaggttgggaatacaatggtgaatgagccacagtccctgccctcagtagcacacccaggggagggtcagctccacccgcccagacagacaccgaactggaaatacacccctaacctctaccccagatacacctgacaagctgatcccctgcccacacacccagcaggtggctccaaggtcagagcctgcagaacacagacgcaatagagaaagactcagcgctgtggaaagacacccccacctacccacgacagtggccacagggccacccccagccaataacaccattacaaagacacgtgccttcagataatgcctgcagaaacgtgcatgctccaagcactctagaaatcccgtctcaagcagtgagtgccccgacagccacagccagaggagacacactcaaagctcctggggtcactctcagagggtctctgagccacgaacccacatccaggcacacacagagtcgtcacagagacacagtatggagtccacagcagcacgaacataggatacgaacgccgcaccacaggacagatctatctttagggagactcagagaactttttatttttaatagagacagggtctcgctatgttggccaggctggtcttgaactcctggcctcaaagcattcctccagctttggcctcccaaagtgctgggattacaggtatgagccagcacactaagcctgattcagagctttgaaccctagacatatgaacagactcagcttcgagttccaaaacaccaatgccacctccagaaacagagacaagcctcccaagataggctcaacctggtccagttagtgaccagcacaggagaaaaatctgtttcactcctcaacccagtgtatagttagagacatatataccaccctaccccctaccaaaaaagattttatcctcctttttttaatgctatttgtgagtcactaagctgatttgacagcccgctgggtcatgaccccctgtttgaaaacaacagaaacagatgtccttcctgggtctcagcccctcctgtgtgtcgaggtgtagaggtggggtcaggtgtgggtgaaccccccacccccgtctgtcccagttatgccttgcatgcagggatgggggaagtggatgtgggtaggttctggttacattgacttctgtccctggcttggggcccaggagccccatccctccctgctcacactgccctcctcagcacttcatggcttcctctctctctccgcctccccactacctcccatcccccatccccacctgctcagcccctgcagggagcactaaggaagtcccactgtcccggtctgtgagaaccccattttacacactggggataagtggcctagagatgaggcagccacggcacttggaataaatgctcccagccactcaagagggcagaattatcaggaatctgtggccctctgcagagagctttgggatcagacagcctcccactgaaacccagctgtcctcccccgagggggtgtggcccccaagctcatagctttgtgaggaccccacagcacattcagggagggctgcgaagtcagatggcaccagggtcctggccagtgaccgggcggccagatctattgcatccaaatagccagcttccactcggctacggcgatcgccagacatgggagtttggtgttgctagatctgatttgtccccctaagagaaacctggatttttaagtgaaatcgcctgatttttgaaaggttggctagcaatttaaattttgcaaaacactaacacctggggaccaccggttggcatccccctccttgtacaaagtggtgctcaggctgtagcgaagggcggaggggcttctgcttccccacccccctcctcctcctcctccattcttctgcccagagtcaccccctcattctggtcactcccgctccctccatccccgcctatcctgcatctcccccaccccctcactccccagagcgatcctcgtgatcttgtgtctccctttctctctctctcacccctccttctctctctcctcagaaacccccagggcctcgccccgagatgtgggcccgctggtgtggggggccgtgggggggacactgctggtgctgctgcttctggctggggggtccttggccttcatcctgctgagggtgaggaggaggaggaagagccctggaggagcaggaggaggagccagtggcgacgggggattctacgatccgaaagctcaggtgttgggaaatggggaccccgtcttctggacaccagtagtccctggtcccatggaaccagatggcaaggatgaggaggaggaggaggaggaagagaaggcagagaaaggcctcatgttgcctccacccccagcactcgaggatgacatggagtcccagctggacggctccctcatctcacggcgggcagtttatgtgtgacctggacacagacagagacagagccaggcccggccctcccgcccccgacctgaccacgccggcctagggttccagactggttggacttgttcgtctggacgacactggagtggaacactgcctcccactttcttgggacttggagggaggtggaacagcacactggacttctcccgtctctagggctgcatggggagcccggggagctgagtagtggggatccagagaggacccccgcccccagagacttggttttggctccagccttcccctggccccgtgacactcaggagttaataaatgccttggaggaaaacatcaggggtgtcttgtaatacatcagaccccctccttgcatgttggggaaagagagggtgggacagggactcctaggtcccagggctgggaagagctgatccacgcccccggggaacgagagcctggcaggggttagactggggaaggctgtggggctcggaccacttggatccttgaaagacgcattggatggccgagaaccgcaaggctcgtgcaactaggattcaggtcactggattggggactcagaggcctggacatttggactcctgggtcccaggacagaggctgcctttctggatggtgtggccagacccatcagaggcaggagttctctggactcctgggccctcgggtggaggtgggggtggggacagcaggggctcagccaggttccctgcgtcctgagagaatgaggccagagggctgtgatccagtggagcctcagacctcaactcccccaggttgctgggggtctcgggaggggagggctgctccccactcccattcttaggggccctgagggcatggggcaggcggggggtgctggggaagtcccacctctggccaccccgactgtggctcccctccttctccatccttgcccccagggatcaccccaggggacttttcagtggctccctgggagtggcggcagctccctccagctcctctcaactggaaaagcaaagacggggggaggggcggcccttggtccttgaactcccaggctcagtaagggacaggtttttacccgcgtcacctctgctctcccaagcctccatgcctcctctgtaacacggggcaggtgtttccatcggcctcacaaggctgtcgtgggacccagtaaggacatgcccgtgatgccctcatgcagcctcattgacctccacagaccccaccaagccctgtgccaggcagtgctggggctgcagctgtggcctgcacagacccagtgccgtcctccggtgtgcacggccataatgaccacaagaatagcagcagtatgtttaggatgaaggtgtgtgtgtggaccgaggggcagtctctctctctcactcccccaccctctgaagccctccagaggatgccaggctgtggaacgggagcagtggagatccaacagtccagcgtcctctggaagcttcctcctcatctggagagtgaggccgatgcatgcgtgacccccacgggcccttccatacttgttacttcctctggttgtttgttgtctgtactcacccacccaccccacccggacaaccggagggcaggggcggggaattgggtccgcctggcacacagtggatccttcagtgccatgctgagtcctccttacacacccagcaaacacctactgtgtgccgaacctcaggcacacagtctagtatggaaattggcaagtaaacgggtaaccactccaaaaactcttccattaggaaagacttgagaaatggaaacgggaggtgctagcaaggaaggagaggcccaggagcaaacaggcttctcgcttctcgaccccttttcctgtcttgccttttttttttttttttttttttttttttttgagacggtgtctagctctgttacccaggctggagtgcagtggtacgatctcggctcactgcaccctccacctcccaagttcaagcaattctcctgtctcagcctcttgagtaacgcacccagcctttttttttttaagaagtggggtggtctccctatattacccagattgggctcaaactcctgggctcaagcgatcgatcctcccacttcagcctccaaaagtgctgggatgacaggtgtgagtcactgtgcctggcccctggctaattttttttttttttttttaagacggagtttcactcttatccaggctggagtgcaatggcgcgatcttggctcacggcaacctccgcttcccaggttcaagcaattctcctgcctcagcctcctgagtagctgggattacaggcgcgcgctagcatgcccagctaacattttgtatttttagtagagacagggtttc[141 bp omitted]ggtcttgtgctcgttgccctggctggtcttgaacaatccgcccgcctcgccctcccaaagcgctgggattacaggcgtcagtcactgccccaagccctaacccccttcctgataagtggaaggagattctagtccccagaggtgattctggatcccagaattctgtccccgcattctctgtcttctagccgcccctggtcctgtctcctctcctctcatcttcccactctgccccgcctcattctgccccagctacacagtctacttgctgttctttaaaaacaatacaaggcaggccgagcacggcataatcccagaacgttgggaggccgaggcgggaggatcacttgagcccaggagttcaagaccagcctgggcaacatggcaaaaccccatctctacaaaaaaattcaaaaaaaaaaaaaaaaagctgggcctggcggcacatgcctgtagttccagccactccggagggtgaggtgggaggatcgcttgagcccaggagattggggctacagttggtggtgatcatgccactgcactctagcctgggtgacaaagcgagaccgtctcaaaaaaaaccatagagccccacaagcctcctgcagggccgctggctgtttgcgctgcctgcgatacccccagacactctcatgactcatccccggtgtctctttcaggcccttgctcagttgtcaccttacagtaaggtagaggccctcccactaccttcggggaccccactttgcacctcctatcacttccgcactgtatatttttgtatcccccgtgacttactcccatctggcatgtgagctattgtactggtttgcttactgttgttctccctgcccaaccagaatcaaagttccatgaaggtagacactttgtatgttttgttctccactcatctcccatgcggggcacacatcctcgctccttcctcatgctcagcagtttgagttgaatgaaagaatgtcccctgcccatgggagaggacatagacaggcaggcgatgatgtggggtgggatggtcgcttggaataaggagctgtggcttcctcctggagaccccctcacgctgtccctctccttgcagagacccccaacacagcaggcgcaggggccacaggcggcatcatcgggggcatcatcgccgccatcattgctactgctgtggctgccacgggcatccttatctgccggcagcagcggaaggagcagacgctgcagggggcagaggaggacgaagagtaagtgatgggccctgagacggggatgggagaggggtcgaagaactgaggagtatggggtaggggtgagggtgggagaaaattctccataatggctgtgtgaaacagacagacctaaaggaactggggtctaaatggagtagggaggtatgggtttctctctgctataaagtatggcattgaatttaaaaattagctgggggccaggcacagtggcttacacctgccatcccagcacttttggaggctgaggtggggagatcgatcgtttgagcccaggaatttgagcccagtctgggtaacataggaagactacccccatctacaaaaaaaaaaaaaaaaaaaaaaaaatggccacgcagggtggctctgaccgctccgctctgcaaagactcctcggagcccaggatcctactacattttttttttttttttgtgacggagtctcactctgtcaccgaggctggaatacagtgatgcaatctcggctcactgcaagctctgcctcccaggttaaagcaattctcctgcctcagcctccggagtagctgggaatacaggcgcccaccaccatgcccagctaattttttggatttttagtagagacagggtttcactgtgttagccaggatggtctctatctcctgaccttgggatcccccctcctcagactccaaaagtgctgggattacaggcgtgagccaccatggctggccagttgttaataaaagaagaaagggcggttcctaaattgttatggagaatttacattaaaataacgtaagctattgattggctatccattgctctttgtatcacaaattccagaaacctgaagataaagagtaacactggtcaggcagggtgggtcaggcagggtggctcctgcctctaatcccagcactttgttttgtttttgtttttgtttaagatggagtcttggtctgtcgccctggctggagtgccaaggcgccatctcggctcactgcaacctccgcctccctggttcaagcgattctccagcctcagcctctcgagtagctgggattacagatgcgcgccaccacgcccggctaatttttgtatttttagtaga[132 bp omitted]ggccaaggctcttgttgctagtggttcgagaccagactgaacatcaaagtgagacaccatctctaaaaaaataaaacaaacaaaattagccaggcaaagtggtgcacacctgtggtccagctcctcaggaggctggggtgggaggtcacttgagcccaggagctcaagtctgcaatgagctatgatcatgccactgcactctagcccaggtgacagagcaagaccctgtatcttaaaaaataaaagactgggcacggtgcctcacacctgtaatcccagcactttgggaagccaacccaagtagataacttgagctcaggagttcgagaccagcctgggcaacatggcgaaacctgtctacaaaaaaaatacaaaaattacccagacctggtagcccatgcctgtagtcccagctacttgggtgggctgaggtgggggtgggggcatgtggaggctgcagtgagctatgatcacaccactgtactccagtctggccaacagagtgagaccttgtaaaaaaaaaaaaagaaaagaaaaatagctcagagcagtctgaggtatgcgagctatgcaaaatttgtttttttgagacaggatctcactctgtccctcaggctagagttcagtggtataatctgagctcactgcaaccttcgcctcctgagctcaaccaatcttcctaccgcagcctcccaagtaaatgggaccacgtaccaccacacctagctagtttttgtatttttgtagagacagggttttgccatgttgcccaggctggtcttgaactcctgacctcaggtgatccacccacctcagcctcccaaagtgctcggattacaggcgtgagccaccatgcccagcctggaatctgtatttaccacaagctctctaagtttttctgatgcacaggaaggtctgttacaccactgtcttaatcatctagttagttcaaaccaataacttgctgctgatctcctctgtgtgcagctccatgctgtgacccactgtgtccgagacggcctggagctcacaatatggaggaggagacaaaactgtctccagatagtgatggtgtagcatgaccagtgatgggatagggcagttgagcaagctctgagaagccagagggggcatctgacccaggctggatggtcaggtagggcttcctggaagaggggacatctgagctgacagaatgcatcgtaagcacctgtcattactgtatgctttggtctgtgggtgtgtagaatgagggacaggaactttaacctaatttgagggacaggaaggcacttcatttattcattcattcttttcacaaatatttactgaactcctcatagtggattctggagacaccttgctgacgacccagatctttcttttttttcttttcttttcttttctttttttttctttttgaggtggagtttcgctcttttttcccaggctggagtgcaatggcgcgatctcggctcaccacaacctccacctcccgggttcaagcaattctcctgcctcagcctcctgagtagctgggattacaggcatgcgccaccacgcccggctaattttgtatttttagtagggacagggtttct[142 bp omitted]agatggcatctcactctattgcacaggctggagtggagtgatctcatctcactgcaacctctgcctcccgagttcaagcgattcttgtgcctcagcctcctgagtagctgggattacaggcgtgcaccatcatgcccagctaatttttgtattttttggggagatggcatttcaccatg[136 bp omitted]gcatggtaattataaataacatttcaagtacaaattcagtaagtgccctgagggggaagtacagctaggtatgtccgtgtaacaggaattcctgatccactggggaaacctgaaggcttccgggaaaaagaggaattcatggaatgaataaaaactcttactccaggcaagaaaagggggcaggggaaagggagacccaggtagagggaacagcatgtgccataaccccggagtcagagggatgcctgggtcttaatctccacttgtcctacctcctaccccacagcctggagggacctccctcctacaagccaccgaccccaaaagcgaagctggaggcacaggagatggtgagcactttccctggagcccaagctatccccacctccacacccaccccagggctgggaggggcctggcagggagaagctggctgggtggtgggggcagttcctgacctccccgcccctctcccactacagccctcccagctcttcactctgggggcctcggagcacagcccactcaagaccccctactttgatgctggcgcctcatgcactgagcaggtaggagctcatgggaagacaaaggtgggttgggggtctgggttgaagggccaggggtcaggcctggcaaaagaggtcaaagactaaaggtcataactcaaggtcaagggtgtgtccccggttggtgcttaatgcattgagatgtgttcaggattccatgggggaggtcaggggtgaaaaggcccaaggtcacaaggttagaatttaaagtcacttgggggctgggcacggtggctcacgcctataatcccagcactttgggaggccaaggcaggaggatcacttggggtcaggagttcgagaccagcctgtgcaacatggtgaaaccccgtctctactcaaaacacaaaaaattagttgggtgtggtggtgcgagcctgtaatcttagctacccggggcgctgaggaggaagaatcgcctgaacccaggaggccgaggttacagtgagctaagatcacaccactgcactccagcctgggcaacagagcaagattccgtctcaaaaaaataaataaaaccaaataaataaaatcacctgggccgggcatggtggctctggtctataatcccagtactttgggaggccaaggtagctggaccccttgagcctaggagctcgagaccagcgtgggcaacatgggctacccagcaacattttgcgtctacaaaaatactgaatttacctggatgtggtggcaaatgcctgtaggctgaggtgggcggattgcttaagcccaggtggttggggctgtgccactacactccagcctgggcatcagggtgagaccctatctcaaaaaaaaaaaaaaagaggaaaagtcattaggtcaatgaaaattgattatctggtcaggcatggtggctcacacctgtaatcccagcactttgggaggctgagacgggcagatcacctgacgtcaggagttccagaccaccctggctaacaaggtgaaaccccttctctactaaaaacaaaaataagccaggcatgggtgacatgctcctgtaatcccagctattcaggaggctgaagcaggagaatcgcttggacccaggaggcagaagttgcaatgagctgagaccacgccactgcactccagccta[134 bp omitted]catggtgaaaccctgtctctactaaaaattacaaaaattagctgggcgtggtggcgggcgcctgtaatcccagctacttgggaggctgaggcaggagaatcgcttggacccgggaggcagaggttgcagtgagcccagattgcaccattgcacaacagcctgggagacaagagcaaaactccgtctcaacaacaaaaaaaaacagaatgaaagaaaattgattatctacatttgctggatactgtgcctgaagctgggacaagacaaatcaagtcactcccctcagtggtctactggaggtcaggggtcagacactgaggttgcgctcaaggttcaaaggactgtttagagcccaaggttaagtatttgaggtcaagactgaggtgaaaggttcatggggaaagatttgcagagatcgagtgtcaaaagtgagtcccaggattaacagggtgagttgcacgagctgggctttgggttaaggaagggctgaatgaatgtcccagtgcaatatggcctcaggggacaaggagtgaggtggcatcttgttggcatggggagagagcggtcaggattttggggtcaagagcagattggtaatctgtgtcgtgcgtaggaagtgatcttgagttcctgtcctctctctacctccaggaaatgcctcgataccatgagctgcccaccttggaagaacggtcaggacccttgcaccctggagccacaagcctggggtcccccatcccggtgcctccagggccacctgctgtggaagacgtttccctggatctagaggatgaggagggggaggaggaggaagagtatctggacaagatcaaccccatctatgatgctctgtcctatagcagcccctctgattcctaccagggcaaaggctttgtcatgtcccgggccatgtatgtgtgagctgccatgcgcctggcgtctcacatctcacctgttgatcccttagctttcttgccaaggatctagtgccccctgacctctggccaggccactgtcagttaacacatatgcattccatttgtgatgtctaccttggtggctccactatgacccctaacccatgagcccagagaaattcaccgtgataatggaatcctggcaaccttatctcatgaggcaggaggtggggaaggtgcttctgcacaacctctgatcccaaggactcctctcccagactgtgaccttagaccatacctctcaccccccaatgcctcgactcccccaaaatcacaaagaagaccctagacctataatttgtcttcaggtagtaaattcccaataggtctgctggagtgggcgctgagggctccctgctgctcagacctgagccctccaggcagcagggtcccacttaccccctccccaccctgttccccaaaggtgggaaagaggggattccccagcccaaggcagggttttcccagcaccctcctgtaagcagaagtctcagggtccagacccttccctgagcccccacccccaccccaattcctgcctaccaagcaagcagccccagcctagggtcagacagggtgagcctcatacagactgtgccttgatggccccagccttgggagaagaatttactgttaacctggaagactactgaatcattttacccttgcccagtggaataggacctaaacatcccccttccggggaaagtgggtcatctgaattgggggtagcaattgatactgttttgtaaactacatttcctacaaaatatgaatttatactttgaccaggtcttgccttttctgtgggatgtgaaggggatggggtgagacatgaaggggaatgaggaaggagtctaagggcttgagagaatcagtgaactggggtcaagagagttaaagacaaaaacaaagggaccaaagatacaaaataagaattgagagagtaa[137 bp omitted]tgcctc[221 bp omitted]cagggcatgctgtttaatgaacattcataattgcaacagcagtatgatgaatgggacaaagataaaaatagcaattggccagatgcagtggctcattcctgtaattccagcacttcgggaaactgaggcgggaagctcgactgagtccaggagttaagagaccagcctgggaaacacagtgagaccccgcctctacgaaagttagccgggcgtggtggcacgcacctgtagttcagctactctggaggctgaggtaggaggatcgattgaggccagaagttcaaggctgcagtaagctatgatggcgccactgcactccagcctgagtgacagagtccaaccttgtctttaaaaaaataaaaattaaaaaagcagtaacgaaagtataagaggctcaagtttaatgaataaacggcaagtaaaagtagactaaaggcaaaatcatgaataatgttgtaataggagcccaaggcatgacggataataaacctgaatgaatgggccagaggcagagtgatgaataatggaaaaatagggaccgggggcaagggaggtaacggacaggagttcatggatccaaaacatgatggctaattagagaagggccggaagaacgacgaaagtgagcaggcaggctggagctaaaagtagtctgggcaatgaagctcaaatgaatggggcagaggcatgatgggtaatgggagaggaatgaatgggccaaagatagaagccgcagtgacgcgaggaacaagaggcatgatgggtaacgaaaggggtgggtctaaggcaactgtttcgctaagaggtgatgagggcattgtgggtaacgaggagcagcgcagggttcgcagaacagattagaattctcccgaggcactctgggaagggccagcacttccggttttaggtcggctactccgaaccagaggtggggtgggggcccggctgccgcggtgcctggtgggacgcgaggcctgaccttgctgcctagccgcctctgccgcgcaacccacctttacctgtccttcgaccctggaacgttagccaatgagagtaccaagctgatacgccaccaaggtcgaccccgtacacgctggagccaatcaaaatgctgcaagggtcaaagccgaccaattatcacagcaacctcgccgcggggcggaatcaaaagagggcctcctccaggagagaggcggggcgatgcctcagcgggcgtggcaaaatgctcagcacagaccaatggcgggttagcaccggaacccgcggcgacgcgagccaataggcgcaggcgctgcgagccaatgggaagggtgggaggggcgccgtggctaccctgcgagtgagaaccaatacaaaaggacatttcagggaaagtgggcgggactttatgcacaagtccaatgggaagaccgagtcttgacgctggtgggcgggcctcagggcacactaaaccaatgggctaggtggggcggggcgacggtggtggcggcggcggcagcgggttcggttgcgcgtggcgcacggggtgggagcggagcccaggccgggagcaggcgccgccgccagtgagaaccggggccggagccgggtgcggatttgctggggctgagtcgggggcgcgcgggccctgacctctgccctctgacctctcccctagcaggcgaccatggggaacgtgttggctgccagctcgccgcccgcagggccgccaccgccgcctgcgccggccctcgtggggctgccgccacctccgccctcgccgccgggcttcacgctgccgccgctgggaggcagcctgggcgccggcaccagtacgagtcgaagttcggaacggacccccggggctgcaaccgccagcgcctcaggggccgccgaggatggggcctgcggctgcctgcccaacccgggcacattcgaggagtgccaccggaagtgcaagggtgaggggcgaggggcccccgctgggctgcgatggcctggatctcgggggaagggggaggacactggggactctgggatttggcgcgcaccattggaattatttaacagcactaggaggtgatgttgggatcgaatggtggaacgttggacttggggcttagaatgatggaatcaaatgctggaaacgggatggaatgtcatagcagtagagaaaagcctttagggacctgaggagccccgggatcagccaagccagacttctcttgtgatcgggaaggcaactgaggcccaaggtcacggtgtcagcaaggtgtcagcgaggttccttgggtatgggacccaaagcctccggatcccagcctggagcaattagagtagtagtagtggtggagatttatggagttctgttctggtgttcattatacgttaactcattagatccttgggacaattctgtgtggtgagggtcccatctttcagatgatgagtttgacctaaagttgctcagcttggtggcagtgagatttgagcaagcaaaggccctggccctgtctaactaggctgtactgcctctttacaggtggaatcctttgtgagatgttctgctgtgggtctctggagagagctgggggtggtagggaaggaagagatgagagttggtgtggggttggagtggagtgtgacagcgtttctcttctccagagctgtttcccattcagatggagggtgtcaagctcacagtcaacaaagggttgagtaaccattttcaggtgagccttcctggtgtccttacccaccagagatcgtccccgccgtccccctccctgcatctgcacactcggcccaattactcctccctcaagagctgggctccctgatacttgaaaagactcggagatatagtgccagactgactactcagtttggggacctagaatccagaggtactgtctccccatagcagctaggctggagtgaaggaacaggtctgtgggcctaccggcagcacctcctttctctgagtctcttagtcaggccgtgcctcccagtcttcatcccctgcccagcccagagaccttgtccttgccctcttcagtgggcaagcctatctgtccagtatcgtcacagctctcgctttccttccaggtcaaccacacagtagccctcagcacaatcggggagtccaactaccacttcggggtcacatatgtggggacaaagcagctgagtcccacagaggtgagcttcctttttcatccattcattgtatccttctaataacaaatttgtagccaaatgtcaagctaagacggcctcatcaggaaaaggtcacagctaccgagagcctggagatggggattgcatctctccgaggtgcactgggacacaaataattccttcatccagcaaacatccgccaaacccctgctctctgcctggccccatgctgagcagtgctggggatgtggccacagccaccctgtcaccagacagcgatgacccagggtggaaagggctggactgtagatcatgcagaactttgaatgccagactaggctttggactttctctagggggttgtggagagtcatggcatggtttggtcaagggaaagacgtggtccacaggttcccgctgtagaaatctctggggcatctctggggtggccatgtgggggctagttattaggaagggcaaaactggaggcccagacagggttggggggactgaatgaggtctctgcttctgtcatttcccttcagcaaatgtgtttattctgcaaaccttcattgcacaacacattctgtgcccagccctgtgctggcacacatgactgaaacagcatgggactcacccgtggggcaggggacagactgttcccagagagtaacaagccaggatgggcaaggctgacatgggggaacccaaaggtcggggagcctaactcagcttaggtggtcagagagcacttcgtggaggaggggacccccatccgaggctttctgaccctaggcttctcaccccggcccatctcacatacttgcacagtgcaccacctctgaccccttccgttctctctgcctcacaggcgttccctgtactggtgggtgacatggacaacagtggcagtctcaacgctcaggtcattcaccagctgggccccggtctcaggtccaagatggccatccaggtgagtggggcacggaggctgctgctcccctcggccaccgtgagcagggagccgccctcacaccccctcctctccacagacccagcagtcgaagtttgtgaactggcaggtggacggggagtatcggggctctgacttcacagcagccgtcaccctggggaacccagacgtcctcgtgggttcaggtaagaggcggagggcttggagggtggtcacaaaactgcagttctggctttgccagcaaatccaccccatttgtgaacctccttttctgccactggagaagtggctcagcaggagtgattttgaaacatcaggcaacatactacagtgggtgagacggtcacccactgaccatgagtgggtgagtcagagcagtcttttttttttttttttttgagatggagtcttgctttatcacccaggttggagtgccgtggcacgatcttggctcactgcaacctccatctcctgggttcatgcaattctcctgcctcagcctcccgagtagctgggattacaggcatgcgctaccacgcctggctaatttttgtatttttagtagagacagggtttcaccacattggtcaggctggtcttgaactcctgacctcaagggatccacccacctcagcctcccaaagtgctgggattacaggtgtgagccaccacgcccagccagtcagcgcaattttaactgagattttcttttgtattaaaaaatgttttaagatggggtcttgctgtattggccaggctggtcttggaactcctggcttcaagcaatcctcccaccttgaccttccaaagtgctgggatgacaggcgtgagccacctcgcctggccagggaaacagcttttcagcctgcaagtagtgcagtcgggactcgtgaaaggaacttgagggaggatggtcccctggttgcataaggctttgcagagccttggccttcgctctgagtgagtctggggctttcggaaaccaaggcatagcttctcacaggaccctgcagctggcgtagagagcagactccaaagggggtaccactgggagggagtggacggggagaggaggttggattctggatgttgtttgaaggcagagctgccaggatttgttgagaccggatggaggcgatgactctgtagtttttggctggaactggaaggatggagtttcggattgccagctttgtgtctttgtgcagccatccactgtgtcgtggagagcaggctcttgagcgctgagtcctgagtgaatgactcgtgcaggcggggaggggagctagggttggccttggacccctgggagtgcctagggagagtcaccacttctcgctgcaggagcccagggagactcaaaagtgttgacttttgagctgccagaggaggagaaggggctaccccggctgggggacaggagcaagaagattccaggcagggagaagcaggaacaggggtgagggaagggaagggccatggcagaaaacccaggagacagggaagctggaggtgcagcaggtgcagagaggcctcctaggtgaggctgatctgtaggggccccatgaggaagaaacatttcctgtccccaactcacctggtgacatcaccccatcttctcatacactacagttgaaccacatgagccttttttgttggtttgtttttgtttttgagacggagtcttgctctgttgcccaggctggagtgctgtggtgcaatctcggctcactgcaacctctgcctccctggttcaagcgattctcctgcctcaggctccctagtatccctagtagctgggactacaggcgcgcgccaccatgcctggctaatttttgtatttttagtagagacaggttttcgccatgtcggccaggctgatctcgaacttcttacctcaagtgatccacccgccccggcctcccaaagtgctgggattacaggtgtgagccaccgcgcccggccgaccatgcaagcttttctgacggttcctgaaaccaccgagttggttctaccccaggaccgacgcacactctgtccctgctgcatggaattcttccctctggtcttgacatgactgggaaggcttgcgtgcgcatgtcgccctctgtcgtccaccattgtccccatcttgcaaggccaagaggaggttctccactaagggcacatggccagtgggactccagtgtccctgctcttcacggcgccagcaaccccgttccctgtgccgcctcgctcgcctggtcctttcgtgctccccagcactggcctcctggagcccagggccaccagtgacgctttggtctctagtcctttccagtgcctcttccttcccccagacaccagtgagaacagggcctgccgtgtgccggtcagggctgagctctcgagtctcttgccaccaacagctccgacttgacccagggtgtctctacctccaggcggctctgtgacctccggcaagtggttccagcccttctgggcttcagtctcctcatctgtcacttgggcacaatagaagcaactacctcccagtgaaggagtccatgagagggcccgacttctcggcctcagcactgggccacatgcacagtcaccacttgctccactctggcatctccatggggacaatgcccgcaggcacccccatttcacagataaggaaagcgaggcccaggggtgaaatcagttgcccagggtgacacagccaggaagcagaggagctgggatttgaatggaagcttaattcaggagcccgtgagcctccccagcccctcccaatggtgacagctccttttctgcttcactctgagcacctcatgtgtgcccagccctgggctgggacacagcagtgaccgagacagcccattcctgccctcatgggggtcccaggtcaggcacagtggctcacacctgtaatcccagcactttgggaggctgaggtgggcggatcgcttgagatcgggagttcaagatcagcctgggcaacatagcaataccctgtctctacaaaaaaaattagaaattaggcatatggtggtacatgcctgtagtcccaactactggggacgctgagctggcagggcacatgcctatagtcccagctacttgggagcctgggaagggggagtggttctattctgaagctgaggccaagccatccaaggccttgcaggtgtgctgaggaacccatatcttctcagggcacgagggagccatggcaggttctgggcagggggtcaacagggtcaggtttgtgctttaacatgatccctctgtctgctgtctgtgaggtcacttgaagttggggcatgagactagagaggaggctgtgggtagagaaactgggggggtggcccaggagatgggaaggatggttagaaagatacttgagggtctcatggcctcagttccaacagtccctggaactcagaggccagagattctaagtcactcactctagatggctgcttttccctctgggcttcagtctcccccttgattgaatgaggggataacactgaccagagtggtaatggtagtgattttttttttcttttcttcccctgccccacctcacatacctctgccctgagacgcagtctctgttgcccaggccagagtgcagtggcacagtgtcagctcacctcaacctccaccttctgggttcaagtgattctcctgtctcagcctcccaagtagctgggattacaggcacgcactgccacacccggctaatttttgtatttttgcgtcgtggcacatgcgtgtaatcccaggtactcgggaggctgaggcaggagagtcacttgaacccgggaggcagaggttgcagtgagccgagatgacgcctttgcactccagcctgggcaacaagagcaaaacgccccatctcaaaaaaaaaaaaaaagagagagagagggagagatgggggtctcgccatgttgccccagctggtctcagactcctgggctcaaacaaccctcctgcctcagcctcccaaagtgccaggattacaggcgtgagctactgtgccccgcccgtgtgatggtgattcaacaaccagtggggggttcggggattcatttgcttcatctcctctgggaaggagagtcacacagtcgcttgcccgagcccatggggaccagctgcagcctacttctgatctcagcctccccagaagatgccaccagggcactggccatgaactcacggcctctctcacacccaccaggctcatcttgggggttgccgcctaacactcagcccctctgagagctccacccagccatgcctgcaggtatgaaaggcccctattcctgcagctccagagagctggctccaggctggctccatgctagcaggccagcctgctcccactgtggggcccctagtctgcccctctggtcatcttggtctgggaagcatcttcgcacctgctttgctctgtgctgtctcagcttctctgtgtgccctcagtctcgtggcccccaacctcccttcccttctccacgtgtcttcctctccagggctgcaccctaggagattgctcgatcgtggtggatttctcaactgtgaatcttcagtccctcttcccccttcatttctgtctctgcagatgtgttgtttctttttttttttttcttttttttttttttttgtctttttgagatgaagtcttgcactgtctcccaggctggagtgcagtggcacaatcacaatctcagcttactgcaacttccgcctcccgggttcaagcgattctcctgcctcagcctcctgagtagctgggactacaggtgtgcaccaccacactcagctaatgtttgtatttttagtagagacagggtttcaccatgttggccaggctggtctcgaacctccgacctcagacgatccacccacctcagcctcccaaagtgctggaattacaggtgtgagccaccgtgcccagcctctttttttctttaaaaattttttaggccgggcgcggtggctcatgcttgtaatcccagcactttgggaggccgaggcaggcggatcacgaggtcaggagatcgagaccacggtgaaaccccttctctactaaaaatacaaaaaattagccaggcatggtggcgggctcctgtagtcccagctactcggagaggctgaggca[137 bp omitted]atctctgttgcccacgttggagtgcagtggcgtgatcatagctcagtgtaaccttgaccttctgagctcaagtgatcctcctgcctcagcctcccaagtagctgggactataagcatgtgccatcatgcctggctacgtttttaaatttatttatttgttgtttgtttgcttattgggacagattctcactctgtcactcaggctggagtgcagtggcactatcatggctcactgcagcctccacctcctgggcttaagcaatcctcccacgtccacccccttagtacctgggactacaggtgtgcaccacctcacccaactaatttttgtattcgctatgtttcccaagctggtttcgaattcctgggctcaaatgaacccactttggcctcccaaactgctgggattacaacaagcatgagccactgtgcctggccttgatttttttttttttttttatgataatctgtagttagatgaagtttttaaattttttgtagagatggggtctcactatgtcacctaggcttgtctccaactgctgacctcaagctgtcctcttgccccagccctccaaagcattgggattactggcatgagccattgcatctggctttttttttttttttttttttttttttttttttttgagatggggtctcaccatgttgcccgggctggcttcgaatgcctaggctcaagcaatcctcccttctcagcctcccaaatagctgggattacaggcacgtgccaccacgccaggcttgttttctttccctgtccctccctctctatttcccactctcttcctccccaattcttctggccctataaaatcacatttgtggcctgtaccctgctaggctcgaaagacaccaaagtgaatccatctccatcctgaggcttgaaaaggcagcccaaaggtggcagttctcttgttcagcaagcactccctacggtggagggacacaggaacgcagacttggacctcagtgcagcaagtcccagccacagctgagcactcgattcctcacaaccccaagaggcagttaggttcacagagagatgatgccagcgtccatggtcaccagccagcctgtggcagggctgggattcgaacccaggctgtgcatatttacccactctacccaatggcctctcagcagcagagtggctcagagcctgggtttgggaggtgtggaggcttggattctgcccttgacacattttgtgagcatgagtgagtgacttaccctgtaagcttctataagtggtggtgaccccctctgtaagtgggggtggataaatgctgaccacatgggcttgtgtcgaccagatgaggtccttcaggtaatgcagtcatagcagggcctgggacgctgacctcagcggtagggaacccctgggcgatgggttaggagaaaggagcccttgagggaggcctgagagcaagcccaagcctccagccggggtgagcctagagggcttcctggaggtggagtctagcctggcactcagggtgggtggaaactgatcgtcattttgcccacaggaatcctcgtagcccactacctccagagcatcacgccttgcctggccctgggtggagagctggtctaccaccggcggcctggagaggagggcactgtcatgtctctagctgggaaatacacatgtgagcctggcgcctgggtccgagggtggaggggctgggcccctggactcctcctgggtctgagggaggacgggctagggccctggacactcaggtctgagggaggaggcctgggttcccagatgcccaaatccccttggtaatgagaccccgcctccaccccactctctgacagtgaacaactggttggcaacggtaacgttgggccaggcgggcatgcacgcaacatactaccacaaagccagtgaccaggtgagtgggtgcagggactagctggtgctgccaggggctgctgggcctggaagtccaggtggggccacttgctaattctcatgtgttgctccggcccctccagctgcaggtgggtgtggagtttgaggccagcacaaggatgcaggacaccagcgtctccttcgggtaccagctggacctgcccaaggccaacctcctcttcaaaggtaaaggtctcggttcccctacgcgggaaacaggcaggaggtgactcaactctgagtggatgtgtgggccaccacaggtgctggaggacagtgtgctgccaccct[143 bp omitted]actccgtctctactaaaaatacaaaaacaaaattagccgggtgtggttgcgggtgcctatagtcccaactactgaggctgaggcgggaaaatggtatgaacccaggaggcggagcttgcggtgagccgagatcgtgccaccgcactccagcctgggtgacagagcaagactccatctcaaaaaaaaaaaagtaggtggacaaccctctactatgttttatgcttggaaaaaaaaagtaggtagagcagccaggcgtggtgactcacgcctgtaatcccagcattttgggaggccaagccaggtagaatacttgaggccaggagttggagaccagcctggccaacgtggtgaaatcccctctctactaaaagtacaaaaattagccaggtgtggtagcgtgctgcaactgtagtccccgctacttaggaggctgaggcacaagaatcacttgaacctgggaggcggaggttgcagggagttgagactgcaccactgcactccagcctgggtgacagagtgagactccatctccaaaaaaaataaaatgaaataaataaataaatgttaaaaaaaatctggtggagcatctgatgggtgtttgggccaagctggagctttgtccatcccctcttatttttctgcacttgactctcttatttttctgagactggtctccctctgtcgcccaggctagagtgcagcagtgcaactgcggctcactgcagcctccacctcccgggctcaagcagccttcccacctcagcctcctgagtagctaggaccacaggtgtatgccaccaggcccagctaatttttttgatagttttgggagacatgggggtttcaccatgttgcccaggctggtctcgaactcctggactcaagccttggcctcccaaagtgctgggattataggtgtgagccaccacacccagccagggtagaaggcactttggaagcctcgagcctgccccattcatcttacgttagtggaaactgaggcttccagaggtttcaaggtcacaactaaatccagaacctcatctcaggcacactggtcgtagtcccaatgtccagtcttaagtcttcttggatatctgtggctcacagattttgggtgtttgagcctcctgctgagcactgctggggccacagcggtgaccagccctgtcttcacgggactcagtgagaggaacagattcatccgcagagtgggcaggactaggttgggggaacccaggggtctagagggcttttcagagggcaggggtcactgagcggagagcagaggaggagtgagccatttgctccagcgtgaagttgttggtgtgatggggtttcagggtggcaggagcagtgtggttaaaggtctggaagctgtcggcatgtggctggtatccaaggtggccaggaactctgcatggatatggtgggaagctggcacgcctctcacctcagctcttccctgcaggctctgtggatagcaactggatcgtgggtgccacgctggagaagaagctcccacccctgcccctgacactggcccttggggccttcctgaatcaccgcaagaacaagtttcagtgtggctttggcctcaccatcggctgagccctcctggcccccgccttccacgcccttccgattccacctccacctccacctccccctgccacagaggggagacctgagcccccctcccttccctccccccttgggggtcgggggggacattggaaaggagggaccccgccaccccagcagctgaggaggggattctggaactgaatggcgcttcgggattctgagtagcaggggcagcatgcccagtgggcctggggtcccgggagggattccggaattgaggggcacgcaggattctgagcaccaggggcagaggcggccagacaacctcagggaggagtgtcctggcgtccccatcctccaaagggcctgggcccgccccgagggggcagcgagaggagcttccccatccccggtcagtccaccctgccccgtccactttcccatctcctcggtataaatcatgtttataagttatggaagaaccgggacattttacagaaaaaaaacaaaaaacaacaaaaaatatacgtgggaaaaaaaacgatgggaggcctccgttttctcaagtgtgtctggcctgttttgagcatttcatccggagtctggccgccctgaccttcccccagccgcctgcagggggcgccagagggccggagcacggaaagcagcggatccttgatgctgccttaagtccggctcagaggggcgcagcgtggcctggggtcgctatcttcccatccggaacatctgccctgctgggggacactacgggccttcccttgcctgagggtagggtctcaaggtcacttgcccccagcttgacctggccggagtggctatagaggactttgtccctgcagactgcagcagcagagatgacactgtctctgagtgcagagatgggggcagggagctgggagagggttcaagctactggaacagcttcagaacaactagggtactaggaactgctgtgtcagggagaaggggctcaaggactcgcaggcctgggaggaggggcctaggccagccatgggagttgggtcacctgtgtctgaggacttggtgctgtctggattttgccaacctagggctggggtcagctgatgcccaccacgactcccgagcctccaggaactgaaaccctgtctgcccccagggtctggggaaggaggctgctgagtagaaccaaccccaggttaccaaccccacctcagccaccccttgccagccaaagcaaacaggcccggcccggcactgggggttccttctcgaaccaggagttcagcctcccctgacccgcagaatcttctgatcccacccgctccaggagccaggaatgagtcccagtctctcccagttctcactgtgtggttttgccattcgtcttgctgctgaaccacgggtttctcctctgaaacatctgggatttataacagggcttaggaaagtgacagcgtctgagcgttcactgtggcctgtccattgctagccctaacataggaccgctgtgtgccagggctgtcctccatgctcaatacacgttagcttgtcaccaaacatacccgtgccgctgctttcccagtctgatgagcaaaggaacttgatgctcagagaggacaagtcatttgcccaaggtcacacagctggcaactggcagagccaggattcacgccctggcaatttgactccagaatcctaaccttaacccagaagcacggcttcaagcccctggaaaccacaatacctgtggcagccagggggaggtgctggaatctcatttcacatgtggggagggggctcccctgtgctcaaggtcacaaccaaagaggaagctgtgattaaaacccaggtcccatttgcaaagcctcgacttttagcaggtgcatcatactgttcccacccctcccatcccacttctgtccagccgcctagccccactttcttttttttctttttttgagacagtctccctcttgctgaggctggagtgcagtggcgagatctcggctcactgtaacctccgcctcccgggttcaagcgattctcctgcctcagcctcccaagtagctaggattacaggcgcccgccaccacgcctggctaacttttgtatttttagtagagatggggtttcaccat[134 bp omitted]ctttctttctgggatccaggagtccagatccccagccccctctccagattacattcatccaggcacaggaaaggacagggtcaggaaaggaggactctgggcggcagcctccacattccccttccacgcttggcccccagaatggaggagggtgtctgtattactgggcgaggtgtcctcccttcctggggactgtggggggtggtcaaaagacctctatgccccacctccttcctccctctgccctgctgtgcctggggcagggggagaacagcccacctcgtgactgggggctggcccagcccgccctatccctgggggagggggcgggacagggggagccctataattggacaagtctgggatccttgagtcctactcagccccagcggaggtgaaggacgtccttccccaggagccggtgagaagcgcagtcgggggcacggggatgagctcaggggcctctagaaagagctgggaccctgggaacccctggcctccaggtagtctcaggagagctactcggggtcgggcttggggagaggaggagcgggggtgaggcaagcagcaggggactggacctgggaagggctgggcagcagagacgacccgacccgctagaaggtggggtggggagagcagctggactgggatgtaagccatagcaggactccacgagttgtcactatcatttatcgagcacctactgggtgtccccagtgtcctcagatctccataactggggagccaggggcagcgacacggtagctagccgtcgattggagaactttaaaatgaggactgaattagctcataaatggaacacggcgcttaactgtgaggttggagcttagaatgtgaagggagaatgaggaatgcgagactgggactgagatggaaccggcggtggggagggggtggggggatggaatttgaaccccgggagaggaagatggaattttctatggaggccgacctggggatggggagataagagaagaccaggagggagttaaatagggaatgggttgggggcggcttggtaaatgtgctgggattaggctgttgcagataatgcaacaaggcttggaaggctaacctggggtgaggccgggttggggccgggctgggggtgggaggagtcctcactggcggttgattgacagtttctccttccccagactggccaatcacaggcaggaagatgaaggttctgtgggctgcgttgctggtcacattcctggcaggtatgggggcggggcttgctcggttccccccgctcctccccctctcatcctcacctcaacctcctggccccattcaggcagaccctgggccccctcttctgaggcttctgtgctgcttcctggctctgaacagcgatttgacgctctctgggcctcggtttcccccatccttgagataggagttagaa[137 bp omitted]gcctcagcctcccaagtagctgggactacaggcacatgccaccacacccgactaacttttttgtattttcagtagagacggggtttcaccatgtt[144 bp omitted]acggggcagctgtgatctttattctccatcacccccacacagccctgcctggggcacacaaggacactcaatacatgcttttccgctgggcgcggtggctcacccctgtaatcccagcactttgggaggccaaggtgggaggatcacttgagcccaggagttcaacaccagcctgggcaacatagtgagaccctgtctctactaaaaatacaaaaattagccaggcatggtgccacacacctgtgctctcagctactcaggaggctgaggcaggaggatcgcttgagcccagaaggtcaaggttgcagtgaaccatgttcaggccgctgcactccagcctgggtgacagagcaagaccctgtttataaatacataatgctttccaagtgattaaaccgactcccccctcaccctgcccaccatggctccaaagaagcatttgtggagcaccttctgtgtgcccctaggtactagatgcctggacggggtcagaaggaccctgacccaccttgaacttgttccacacaggatgccaggccaaggtggagcaagcggtggagacagagccggagcccgagctgcgccagcagaccgagtggcagagcggccagcgctgggaactggcactgggtcgcttttgggattacctgcgctgggtgcagacactgtctgagcaggtgcaggaggagctgctcagctcccaggtcacccaggaactgaggtgagtgtccccatcctggcccttgaccctcctggtgggcggctatacctccccaggtccaggtttcattctgcccctgtcgctaagtcttggggggcctgggtctctgctggttctagcttcctcttcccatttctgactcctggctttagctctctggaattctctctctcagctttgtctctctctcttcccttctgactcagtctctcacactcgtcctggctctgtctctgtccttccctagctcttttatatagagacagagagatggggt[131 bp omitted]tctgccctctgcatctgctctctgcatctgtctctgtctccttctctcggcctctgccccgttccttctctccctcttgggtctctctggctcatccccatctcgcccgccccatcccagcccttctccccgcctcccactgtgcgacaccctcccgccctctcggccgcagggcgctgatggacgagaccatgaaggagttgaaggcctacaaatcggaactggaggaacaactgaccccggtggcggaggagacgcgggcacggctgtccaaggagctgcaggcggcgcaggcccggctgggcgcggacatggaggacgtgtgcggccgcctggtgcagtaccgcggcgaggtgcaggccatgctcggccagagcaccgaggagctgcgggtgcgcctcgcctcccacctgcgcaagctgcgtaagcggctcctccgcgatgccgatgacctgcagaagcgcctggcagtgtaccaggccggggcccgcgagggcgccgagcgcggcctcagcgccatccgcgagcgcctggggcccctggtggaacagggccgcgtgcgggccgccactgtgggctccctggccggccagccgctacaggagcgggcccaggcctggggcgagcggctgcgcgcgcggatggaggagatgggcagccggacccgcgaccgcctggacgaggtgaaggagcaggtggcggaggtgcgcgccaagctggaggagcaggcccagcagatacgcctgcaggccgaggccttccaggcccgcctcaagagctggttcgagcccctggtggaagacatgcagcgccagtgggccgggctggtggagaaggtgcaggctgccgtgggcaccagcgccgcccctgtgcccagcgacaatcactgaacgccgaagcctgcagccatgcgaccccacgccaccccgtgcctcctgcctccgcgcagcctgcagcgggagaccctgtccccgccccagccgtcctcctggggtggaccctagtttaataaagattcaccaagtttcacgcatctgctggcctccccctgtgatttcctctaagccccagcctcagtttctctttctgcccacatactggccacacaattctcagccccctcctctccatctgtgtctgtgtgtatctttctctctgcccttttttttttttttagacggagtctggctctgtcacccaggctagagtgcagtggcacgatcttggctcactgcaacctctgcctcttgggttcaagcgattctgctgcctcagtagctgggattacaggctcacaccaccacacccggctaatttttgtatttttagtagagacgagctttcaccatgttggccaggcaggtctcaaactcctgaccaagtgatccacccgccggcctcccaaagtgctgagattacaggcctgagccaccatgcccggcctctgcccctctttcttttttagggggcagggaaaggtctcaccctgtcacccgccatcacagctcactgcagcctccacctcctggactcaagtgataagtgatcctcccgcctcagcctttccagtagctgagactacaggcgcataccactaggattaatttgggggggggggtggtgtgtgtggagatggggtctggctttgttggccaggctgatgtggaattcctgggctcaagcgatactcccaccttggcctcctgagtagctgagactactggctagcaccaccacacccagctttttattattatttgtagagacaaggtctcaatatgttgcccaggctagtctcaaacccctgggctcaagagatcctccgccatcggcctcccaaagtgctgggattccaggcatggggctccgagcccggcctgcccaacttaataatacttgttcctcagagttgcaactccaaatgacctgagattggtgcctttattctaagctattttcattttttttctgctgtcattattctcccccttctctcctccagtcttatctgatatctgcctccttcccacccaccctgcaccccatcccacccctctgtctctccctgttctcctcaggagactctggcttcctgttttcctccacttctatcttttatctctccctcctacggtttcttttctttctccccggcctgcttgtttctcccccaacccccttcatctggatttcttcttctgccattcagtttggtttgagctctctgcttctccggttccctctgagctagctgtcccttcacccactgt[137 bp omitted]acctccacttcccagattcaagcaattctcctgcctcagcctccagagtagctgggattacaggcgtgtcccaccacacccgactaatttttgtatttttggtagagacaaggcttcggcattgttggccaggcaggtctcgaactcctgacctcaagtaatctgcctgcctcaccctcccaaagtgctgggattacaggcatgagccacctcacccggaccatccctcattctccatcctttcctccagttgtgatgtctacccctcatgtttcccaacaagcctactgggtgctgaatccaggctgggaagagaagggagcggctcttctgtcggagtctgcaccaggcccatgctgagacgagagctggcgctcagagaggggaagcttggatggaagcccaggagccgccggcactctcttctcctcccaccccctcagttctcagagacggggaggagggttcccaccaacgggggacaggctgagacttgagcttgtatctcctgggccagctgcaacatctgcttgtccctctgcccatcttggctcctgcacaccctgaacttggtgctttccctggcactgctctgatcacccacgtggaggcagcacccctcccctggagatgactcaccagggctgagtgaggaggggaagggtcagtgtgctcacaggcagggggcctggtctgctgggcctgctgctgattcaccgtatgtccaggagctggagcagcaccctctcagagcctcagtttccccagatgtcaatgagagaatcagcatcagccacatctcccacctgaagaatcgaaccttgagttctcacctttaagaatttttttttttttttgagacagtgccttgctcagtcgaccacgctggagtgcagtagcacgatcatcaatcactgcagcctccaactcaagcaaccctcctgcctcaacctcctgagtagctggggccacaggcacccaccaccatgcctggctaattctttcttttttgagatggagtctcactctgtcgcccaggctggagtgcagtggcaccatcttggctcaccgcaacctctgccccccgggttcaagcaattctcctgcctcagcctcctgagtagctagaattacaggcgcacaccaccacaccaggctaatttttgtatttttagtagaaacgaggtttcaccacggtggtcaggttggtctcaaactcctgacatcaggtgatccacccgcctcggcctcccaaagcactgggattacaggagtgagccaccatgcctggccatattttaaacttttttgtagagatggggtcttactatgttgcccaggctgatctcaaactcttgggctcaagcagatcctcctgccaaagcttcccaaagtagttggattacaggtgtgagccaccacgccccaccaacctatgaagatgtctaagcagacagggtgccctatctcaccacatccccagtcagatccagaggtgggacaaggatgggaaggaggttccagaacaaaggctggcagggagtcgtatgggacaggagctgacccagcaaccatccacagagacatcctggagcctgggaaggagaaggacaaagagcccccttttttaaattttttttatgtttttgagacggagtctcactctgtcacccaagctggagtgcagtggcacaatcttggctcactgcaacctccacctcatgggttcaaacgactctcctgcctcagcctcctgagtagctgggaccacaggtgcacaccaccatgcctggataatttttgaatttttggtagagacggagtttcaccatgttggccaggcaggtctcgaactcctgacctcaagtgctccgcccaccttggcctcccaaagttctgggaatacaggcgtgagccactgcaaccagccagtagcccccatctttgcccctcgctgagccctactggatgttcttggttatgcgacagtttccccatctattaaagagaaacccctatagcagaggggaggatgaggttggaaaagcaggagcattgttatgctattcttgtggggtctgggaagcagacatctgggtggatgtttggggggtgctgggcttagttggggaagtaggggggcccctggggctgacagggactggaagctctgagctggccagagggatgttgcaatcctgccagggtcttgtctatgctgtccttttcacaaccatccccctactgccaggctgacacgtggttgcgggggcacaaggccagccaacctagagtctgaggctaggcggaggacaccctccccaccagctgccagggtcactggcggtcaaaggcagctggtggggaaggcattggactccagccttgggggacggatgtagtgatggtgggaagcaggcttggtgccaggaggggcgtcagagggtgaataaaagcagatagagtgtttgggggaggtagccagccaaagggggtgaggcccggtggaagggaagaagggacatacacgcagagctttgcagctgagggttttaattttttgagatggggtctctgtcccaccaggctggagtgcagtggcacaatcacagctcactgcagcctcgaactcctgggctcaagcaatcttcctacctcagcctcttgagtagctgggactacaggcatgcgccaccacgctcggctaatttttgaacttttttgtagagatgaggtctccctatattgcccaggctggtctcgaactcccaggctcaagtgatcctccctcttcagcttcccaaagtgctgggattacaggcatgagccaccatgcctggctaatgcaggtgaggtttttgcagtgtcatccagctaaggcgacccgttcccctcccaaaaaagggagactgagaaccatgaagttaagagcccagagaatatcacggtggtctggggtgcttcaagggctggtctggaataaattggaggtggcacgcagggtaggagcgccgggccaactgggagacccagcaacataaaggaaaagttgttggggctgaggaggcttgctgagagaggggaagtgagggaaagaggtgatctagggacacggtgtgaatgagggggggatgagatcacagggttattactgggagacccctgagggaagatggccacagggacaggacaaggctgtcttcttaagggaggagaccacccctcatattgtcttatgcccaatttctgcctccaaagaaagaaaaagtaaaaactaaaaggcagaaatgaaatccacaagcagacagcccgcgccacaccctgggcctggtggttaaagattgacccctgacctaatccgttaggttatctatagattacagacattgtatagaaaagcactgtgaaaatccctattctgttttgttccgatctaattaccggtgcatgcagcccccagtcacgcatcccctgcttgttcaatcgatcacgaccctctcacgtgcacccacttagagttgtgagcccttaaaaggaacagggattgctcactcggggagctcggctcttgagacaggaatcttgcccattccccgaacgaataaaccccttccttaactcagcgtctgaggaattttgtctgcggctcctcctgctacattctgagtggggaaagggactaaggtggtctgaggaccccacagagtcaggaagattgagaggtgagagtgctgaacggggaggggctttggggctaagggaagtgcccgggaccccacctgaccccaacgctcacgggacaggggcagaggagaaaaacgtgggtggacagagggaggcaggcggtcaggggaaggctcaggaggagggagatcaacatcaacctgccccgccccctccccagcctgataaaggtcctgcgggcaggacaggacctcccaaccaagccctccagcaaggattcaggttggtgctgagtgcctgggagggacacccgcctacactctgcaagaaactcaaaaagggagatgaggggatcgtgggagggaggtagggagggaggagggtgccactgatcccctgaacccctgcctctgcctccagagtgcccctccggcctcgccatgaggctcttcctgtcgctcccggtcctggtggtggttctgtcgatcgtcttggaaggtaaaagtgggatgggagaattgcggagttggagatttggaagagtgaaggtggctacaggcctggggtcccggcttagaggacctctgagagctccggggccccttctgggtcgtggttgcctcatcgtggtcgggtgggtctccaggttctcccaggctcagtcccgcaggcgccaaatctgcgcaggagagcactagcaaccgatgacgtattgaggcccacacctctgggattggctgtcctgcttcgacagccttgaaagtgggtaagctgggtggggggctctgggagaggtcagtgctgagtaaggcaattcccagcagcttgagccccaccaggtcactccagtattcctccccattctttttttttttttttttttttctcttgagacggagtctcgctctgtcgccgaggctggagtgcagtggcgcgatctcggctcactgcaagctccgcctccctggttcacgccattctcctgcctcagcaggactacaggcgcccgccaccgcgcccggctaattttttgtattttcagtagagaca[138 bp omitted]ccatcccggtatccc[136 bp omitted]acttcgtctctactaaaaatacaaaaaaattagccaggtgtggaggcacgcgcctgtaggcccagctactcgggaggctgaggcaggagaatcacttgaacccgggaggcggaggttgcagtgagccgagatcataccactgcactccagcctggctgacacagcaagactccgtctcaaaacaaaacaaaacaaaaatagctgggtgtggtggtgcacacctgtaatcccagctacttgggaggctgaggcaggagaactgcttgaacccgggaggtggtggttgcagtaggccgagatcatgccactgcactccagcttgggctacagagcaagactccatctccaaaaaaaaaaaaaaaaaaacaaattttgaacccctgcccatcttcctggcaggcccagccccagcccaggggaccccagacgtctccagtgccttggataagctgaaggagtttggaaacacactggaggacaaggctcgggaactcatcagccgcatcaaacagagtgaactttctgccaagatgcggttagaacccttcccagggcacgggagagctggggtgtgtttttgggtggagccctggcagatggtccaagatgaacagattgaaaaaaaaacaagtcctggagaggctgacaacatccctctggtcacacagctagatctcaaggtgctcagacttcaaggacagtttccctgactcccatccaggccatattttaaaagatggtcttgggctgggcacggtggctcatgcttgcaatcccagcacttagggaggccgaggtgggctgattgcctgaggtcaggagttcgagaccagtctgaccaacatggtgaaaccttgtctctactaaaaatacaaaaaaattaggcaggcatggtggcgtgcacctgtaatcccagctagtcgggaggctgaggcaggggaattgcttgaaccagg[138 bp omitted]tatgggaggctgagatgggaggattgcttgagcccaggagttcgagaccagcctgaccaacatggcgagatcctgtctccatttaaaaaaaaaaaaaaaaagatggttttgtgaggtaatgaaaatgaaggccccaagcttggccagacctgggtccccaggctggagtagcaccccttcctgtgtgatcttgacagaggggcattactgtgagcctcagtttcctctcctataaactggtggttctacagggaagtaaaggagcaggcctacagggtgtctggtacatgtagatgctcagtatatcatgaaacccacccttgccccctttggcaagttagagagtcattcgttctttcaaaaatatttactgagcatctgctaagtgctggaaactgtttcaatgtggggaataaaacagtgaagaacgtgccgagcacggtggctcacacctgtaaccccaccactttggaaggccgaggtgggtggatcacttgaggtcaggagtgcgagaaccccgtccctaatagaaatgcaaaaaaaattagctgggcatggtggcccatgcctgtagtcccagctccttgggaggctgaggcgagaggattgcttgagcccaggagatctaggctgcagtgcgccatgtttgtgccactgcattccagcctgggtaacagaatgagaccctgtctcaacaaaaaaagaaaagaaaagagaagaaaagagaaaagaaagacagggagggagggaggaaggaagggagggagggagggaaaatagagccaggcataaacttagaaagatcgtttggaggccaggcacaatggctcacacctgtaatcccagcactttgggaggccaaggcaagcagatcacctgaggtcaggagttcgagaccagcctaacatggagaaaccctgtctctactaaaaatacaaaattagccgggcgtggtggtgcattcctgtagtcctagctactcgggagcctgaggcaggagaatcacttgaacccgggaggcggaggttgcagtgagccgagatcatgccactgcactccagcctgggcgacaaggcgagactccatgccaaaaaagaaaaaaaactcctggcgcggtggctcacgccagtaatcccagcactgtgggaggctgagcaggcggatcacgaggtcaggagttcgagactagcctgctcaacataatgaaaccctctctgtactaaaaatacaaaaattagctgggtgtggtggcaggcacctgtagtcccagctactcgggaggctgaggcaggagaatggcttgaacctgggaggcagaggttgcagtgagccgagacagtgccattgcactccagtccaggtgacagagcgaaactccatctcaaaaaaaaaaggaaggcattggtagcaagagatggcaggccttgaaagccaggccagggtgaagtgtttcttttttttttttttttttttttctttttaaatttttttttttgagacggagtctcgctctgtcacccaggctggattgcagtggcctgatctcggctcactgcaagttccgcctcccgggttcatgccattctcctgcctcaccctcccgagtagctgggactacaggcacctgccaccacgccagctaattttttgtattcttagtagaatgtagaatttactt[153 bp omitted]gtggtgcgatctcggcttactggaacctccacctcccgggttcaggcaattctcctgcctcagcctcatgagtacttggaactacaggtgtgtgacaccacacatggtattttttgtatttttagtgaagatgacatttcaccatgttgcccaggttggtctcgaactcctgacctcaagtgatcagcctacctcggcctcccaaagtgttgggattacaggcgtgagccaaatgcccagccaagggtaaagtgtttagacttcaacgtgctttggtccatctgggaaactgaggcacagaagttggcccacccagcccagcggtcctcctaatcccacagacagtggggatggagattctgcaaggggaagaggtgggagtcaggtagcaggcagaatttggacagcctgggaggtagctgcacacagtgacccccttccttattcctccccacagggagtggttttcagagacatttcagaaagtgaaggagaaactcaagattgactcatgaggacctgaagggtgacatcccaggaggggcctctgaaatttcccacaccccagcgcctgtgctgaggactccctccatgtggccccaggtgccaccaataaaaatcctacagaaaattctctcctgagtgcttctttactctggggaaggggctgcgggagagggtaggggcttccagagagggcagggtctgcaggagagggcaggggctaaaccttaggtactcctcacaagccctccaatgccctatctacttgccctgtgctgaggatgttttaactccatggtctcaaaagagtcttcctaagaaccctgcaaactgggccttattaatcccataagggcattgaggcccagagaggtgaagttacttgtataaggtcacacagccaggaagtagagaactggaactagattgaaccctcagcctagcaatgtcactatgctacacttttcctagtgtggtctacccgagatgaggggctgaggtttttttttgtttttgtttctgttttgaggcagactcactctctcccccaggatggagtacagtggtgcgatctcagctcactgcaacctccacctcccaggttcaagagattatcctgcctcagcctcccaagtagctgggatttacaggtgtgcgccaccacacccagctaatttttgtatttttagtagagacagggtttcatcatgttggccaggctggtctccaactcctgggcttaagcaatcctcctgccttggcctcccaaagtattagaattacaggcgtgagccactgtgcctggctcttatgtaaaattaaaccacatacacatgagaaacaaccctatgtaattaagatttctttctttttttttttttttttaagagatggagtcacccaggctggagtgcagttgcacaatctccattcactgcagccttgcaacctccaccacctgagttcaagggattctcctgcctcagcctcctgagtagctgggattataggcatgtgccaccacgcccagctaatttttttgtatttttagtagagacggaatttccccatgttggccaggctggtctcaaactcctggccttaaatgatccacccgtcctggcctcccaaagtgctgggattacaggtgtgagccaccgcacccagcttaagatttcataagaaaaatatttgtaagccacatatctaataaccggttaatattcaggctgggtgaagtggctcatgcctgtaatcccagcactttgggaagacaaggcgggcggattacctgaagtcaaaagtttgagacctgcctggccaacatggtgaaaccctgtctctactaaaaatacaaaaaaattagccgggtggggtggcacatgcctgtaatcccagctgcttgggaggctgaggcaagagaatcccttgaacccaggagtcgaaggttgcagtgagccaagatggcgccactgccctccagcctgggagacagagtgggactccatctcaaaaaaaaaaaaaattcaaaatgtataatatacaatcctagttgggacatcaaacactgcagccactgtggaaaacagtatggggtttcctcaaaacattaaagatagaactctcaaatgatccttcaatcccacttctgggtatttattcaaaagaattgaaatcaggaccttgaagagatacctgccctcccatgttcactgcaggtctgctcaatacccaagatatggaaacaacctaaatgtttatcaacagatgaatgggtcaaggaaatgtggtctctacatgtaatggaatgtaacgcatccttaaaaaggaaaccctaaggccgggctctgtggctcacacatgtttttttttttaaattttatttatttatttatttatttatttattttttattgatcattcttgggtgtttctcacagagggggatttggcagggtcataggacaatagtggagggaaggtcagcagataaacaagtgaacaaaggtctctggttttcctaggcagaggaccctgaggccttccgcagtgtttgtgtccctgggtacttgagattagggagtggtgacgactcttaacgagcatgctgccttcaagcatctgtttaacaaagcacatcttgcaccacccttaatccatttaaccctgagtggacacagcacatgtttcagagagcacagggttgggggtaagatcacagatcaacaggatcccaaggcagaagaatttttcttagtatagaacaaaatgaaaagtctcccatgtctacttctttctacacagacacggcaaccatccgatttctcaatcttttccccaacttttcccccctttctattccacaaagccgcgattgtcatcctggccggttctcaatgagctgttgggcacacctcccagacagggtggtggccgggcagaggggctcctcacttcccagtaggggcggccgggcagaggcgcccctcacctcccggacggggtggctgccgggcggagaggctcctcacttctcagacagggcggttgccaggcagagggtctcctcacttctcagacggggtggccgggcagagacgctcctcacctcccagacggggtcgcggccgggcagaggcgctcctcacatcccagacggggcggcggggcagaggcgctccccacatctcagacgatgtgcggccgggaagaggcgctcctcacttcctagatgggatggcggccggacggagacgctcctcacttcccagactgggcagccaggcagaggggctcctcacatcccagacgatgtggctcacgcatgttatcccagcactttcggaggtca[135 bp omitted]agaatcgcttgaacccaggaggtggaggctgcagtgagccgagatcatgccactgcactccagccggggcatcagagcaagactcaatctcaaaacataaaaggaaatcctgaaactgggcacagtggcttatgcgtgtaatcccagcactttggaaggctgaggtgggaggatcacttgaggtcaggagttcgagaccagcctgggtaacatggtgagacaccatctctaccaaaaaaagaagaaagagaataaataaatgtataaatattactccctggggttaatgcatccccttctcccccaaatcaaccctccaaactcctatactctcctgtcttctcactcagcagcctgttagaactcaagtcagattttttgttttttgttttttgagacggagtctcactctattgcccagcctgtgcagtggcaccatctcagctcactgcaacctctgcctcccaggttgaaccgattttcctgctcagtctcccaagtagctgggactacaggcgtgtgtgtgccaccacacccagctaatttttgtatttgtagtagagacggggtttcaccatgttgcccaggttggtctcgaactcctgagctctagcaattagccctccttggcctcccaaagtgctggggttacaggcatgagccaccatggccggcctcaagtcagattatgctcttcctctgctcagaactctcctgattctctcagagtaaacccagaagcacttaccaaggcctacaaacgggacactatgccgtccacgatcgcctcctccctgtctctctctccatcactcacaagcaactctttgctattcctccaatgtactgggcaggttcccatctcagggcccttgcagttactgttcctcttgcctggaatgttcttccccaggggtccagatatctgcctggctccctcctcacttcctccagttctcttccaaaatcatcccctgccagacgtggtggcacacgcctgtaatcctaactctttgagatgccaaggtgggaggattgcttcagctcaggagttcaagatcagcctgggcaatagcaagaccccatccgttctaaaaataaaaataaataaaaaataaaaaataaaaattagctgagcatggtagtggacaccttggggttccagccacgtggcaggctgaggtaggaggatggctttgaatcagggaggttgaggctgcagtgagccatgttctgaattagatactggtgatgatcgtgcaaccttcccaatataggaaaaaccactgaacagtacattttcaaagggtaaatttagccggacacggtggctcatgtctgtaatcccagcacttttggagtccgaggc[131 bp omitted]gaggcaggagaattgcttgaacccgggaggcagaggttgtggtgagccgacatcacaccatcgtactccagcctgggcaacaagagcgaaactccgtctcaaaaaaaaaaaaaataattaagaaattagccaggcgtggtggtgggtgcctgtagtctcagctacttgggaggctgaggcatgagaatcgcttaaacccggcgggtggaggctacagtgagcctagattccaccaccgcactccagcctgggcaactgagtgagactccacctcaaaaaaataaataaaagggtaaattttatggaatgtgaatcataattcaatttttcaacatgcgttaggagggacatttcaaactcttttttaccctagactttcctaccatcacccagagtatccagccaggaggggaggggctagagacaccagaagtttagcagggaggagggcgtagggattcggggaatgaagggatgggattcagactagggccaggacccagggatggagagaaagagatgagagtggtttgggggcttggtgacttagagaacagagctgcaggctcagaggcacacaggagtttctgggctcaccctgcccccttccaacccctcagttcccatcctccagcagctgtttgtgtgctgcctctgaagtccacactgaacaaacttcagcctactcatgtccctaaaatgggcaaacattgcaagcagcaaacagcaaacacacagccctccctgcctgctgaccttggagctggggcagaggtcagagacctctctgggcccatgccacctccaacatccactcgaccccttggaatttcggtggagaggagcagaggttgtcctggcgtggtttaggtagtgtgagagggtccgggttcaaaaccacttgctgggtggggagtcgtcagtaagtggctatgccccgaccccgaagcctgtttccccatctgtacaatggaaatgataaagacgcccatctgatagggtttttgtggcaaataaacatttggtttttttgttttgttttgttttgttttttgagatggaggtttgctctgtcgcccaggctggagtgcagtgacacaatctcatctcaccacaaccttcccctgcctcagcctcccaagtagctgggattacaagcatgtgccaccacacctggctaattttctatttttagtagagacgggtttctccatgttggtcagcctcagcctcccaagtaactgggattacaggcctgtgccaccacacccggctaattttttctatttttgacagggacggggtttcaccatgttggtcaggctggtctagaactcctgacctcaaatgatccacccacctaggcctcccaaagtgcacagattacaggcgtgggccaccgcacctggccaaatttttaatttttttctagagatagggtcttactgtgttgcccaggctggtgtcaaactcctgggctcaagcagatcctcctgcctcagcttcccaaagtggtgggattataggtgtgagccactgcgcccagtcagtagccccctctttgcccctcactgagccctactggatgttcttggttgtgtgacagtttccccatctattaaacagaaacccctatagcagaggggaggatgaggttggaaaatcaggagcattgttattctattcttgtgggatcggggaagcagacatctgggtggatgtttggggaatgctgggctcagttgaggaagtaggggggcccctggggcttacagggactggaagctctgagctggccagagggatgttgcaatcctgccagggtcttgtctatgctgtccctttcacaaccatccccctaccgccaggctgacacgtggttgtgggggcacaaggccagccgaactagagtctgaggctgggctgaggacaccctccccatcagctgccagggtcactggcggtcaaaggcagctggtggggaaggaattggactccagccctgggggacggatgtggtgatggtgggaagcaggcttggtgccaggaggggcatcagagggtgaataagagcagatagagtgtttgggggaggtagccagccaaagggggtgaggcccggtggaagggaagaaggggcatacactcagagctttgcagctgaaggttttaattttttgagatggggtctcactctgtctcaccaggctggagtgcagtggcgcaatcacagctcactgcagcctcgaactcctgggctcaagcaatcttcctacctcagcctcttgaatagctgggactacaggtgtgcgccaccacgctcagctaatttttgaacttttttgtagagatgaggtctccctatattgcccaggctggtctcttaactcctgggctcaagtgatcctccttcctcagcttcccaaagcgctgggattacaggcatgagccaccatgcctggccaatgcaggtgaggtttttagtgtccagctaaggcgaccccttccctttgcaaaaaagggagactgaaaatcatcaagttaagagcccagagaatatcagggtggtctgggatgtttcaagggctggtctgaaagaaattggaggtggcacgcagggcagggttgcggggccaactgggaggccccagcaacataaaggaaaagttgttggggctgaggaggcttgctgagagaggggaagtgagggaaagaggtgatctagggacacggtgtgaatgagggggggatgagatcacagggttattactgggagacccctgagggaagatggccacagggacaggacgaggctgtcctctgagtggggaaaggagctatggtagtctgaggaccccccagagtcagggagattgggaggtgagggtgctgaatggtaaagggcttcggagctaagggaaatggtcaggaccccacctgaccccaacgcccacgggccaggggcagaggagaaaaacctgggtgggcagaaggaggcaatcttccaggggaaggctcaggaggagggagatcaacatcaacctgccccgccccctccccagcctgataaaggtcctgcgggcaggacaggacctcccaaccaagccctccagcaaggattcaggttgttgagtgcttgggagggacacccgcctccactctgcaagaactcataaagggagatgaggggatcgtgggagggagggaggagggtgccactgatcccctgaacccctgcctccgcctccagggtgcccctccggcctcgccatgaggctcttcctgtcgctcccggtcctggtggtggttctgtcgatcgtcttggaaggtaaaagtgggatgggagaattgcggagttggagatttggaagagtgaaggtggctacaggcctggggtcccggcttagaggacctctgagagctctggggccccttcttggtcgtggttgccccattgtggtcgagtgggtctccaggttcgcccaggctcagtccggcaggcgccaaatctgcccaggagagccctagtaaccgatgacgtatggatctccacacctctgggattggctgtcctccttttatagccttgaaagtgggtgatggggcgatgggctgtgggaggaggtcagtgctgagtaaggcaattcccagcggcttgagccccacgcggtcacttcagtatcctccccattctaaccacatgatccccaaggatctccttatctatccccgggatccc[136 bp omitted]accccatctctactaaaaatacaaaacagccaggcgttgtggtgcgcgcttggctacttgggaggctgagacaggagaactgcttgaacctaggaggcggaggttgcagtaagccgagatcgcaccatttgacacagcaagtctccgtctcaaaactacaacaacaacaacaacaacaaccaaattttgcacccctgcctcatcttcctggcaggcccagccccagcctagggggctccagaagtctccaacccctttgatggcctggaggagttaggaaagaccctggaggactacactcgggaattcatcaaccgcatcacacagagtgaacttcctgccaagatgtggttagaacccttcccagggcacgggagggctggggtgtgtttgtgtggagccctggaggatgtccaagatgaacagattgaaaaaaaaaacaagtcccagagaggctgacagcatccttctggtcacacagctagatctcaaggatctcagacgtcagggacagtttcccggactcccatccaggccacattttaaaagatggtcttgggctgggcgccgtggctcacacctataatcctaacactttgggaggcctaggcgggcggattgcctgagatcaggagttcaagaccagcctggccaacatggtgaaaccctgtctctactaaaagtacaaaaaattagcctgacatgggggtgtgcacctgtaatcccagctactcgggaggctgaggcaggggaattgcttgcaccagtaaggtgggggttacagtgagccaagattgcaccactgcactccagcctgggcaacaaagcaacattccgtcacaaaagaaaaaaaaaaaagatggttttgcttaggtacggtggctcacacctgtaatcccagcactgtgggaggattgctgga[139 bp omitted]ctccccagttcaagcaattctctgcctcagtctcctgagtagctaggattacaggcgcccaccaccacgcccggctaatttttttgtatttttagtagagatggggtttcaccatcttggccaagctggtcttgaactcctgaccttgtgatccacccgcctcagcctcccaaagtgctgggattacaggtgtgagccaccatgcccggtgatcctgtctctatttaaaaaacaaaacaaaacaaaacaaaacaaaaagcatacaagccagccccggtgcgatagctcatgcctgtaatcccagcactttgggaggctgagtcgggcagattacctgagatcgggggttcgaggccaagttgggcagatcacctgaggttgggagtttgagaccagcctgaccaacatggagaaactccgtctctattaaaaatacaaaattagtcaggcatggtggtgcatgcctctattcccagctacttgggaggctgaggcaggagaatcacttgaacctgggaggcggaggttgcagtgagctgagataatgccattgcactccagcctgggcaataagagcgaatccacgtctcaaaaaaaaaaaaaaaaattgaaaaaaaaaaagatggtcttgtggggtaatgaaggacacaagcttggtgggacctgagtccccaggctggcatagagccccttactccctgtgtgatcttaagagagaggcattactgtgagcctcagtttcctttcctgtgaaatggtggttctgtggggaagtaaagcagaaggcctatagggtgtctggcacattgtaaatgctcagtacatcttcaaatccacacttgctccctttggcaagttagagagtcattcgttcctcaacacatatttattgagcatctgctaagtgctagaaactgtttcaatgtggggaataaaacagtgaagaatatgccgagcgcggtggctcacacctgtaatcccagcactttggaaggctgaggtgagtggatcacttgaggtcaggagtttgagaaccccatctctactagaaatacaaaaaattacccaggcgtgatggcacacacctgtagtcccagctacttcggagacggaggcaagaggatcacttgagcccaggaggttgaggctgcagtgagctatgtttgtgccactgcattccagcctgggtaacagaatgagaccctgtctcatccaaaaaaaaaagaaagaaagaaagaaagaaagaaggaagggagggagggagggagggaaaatctagtcaggcctaaacttagaaagattgtttggaggccaggtgcagtggctcatgcctgtaatcccagcactttggcaggctgaggcgggcagatcacctgaggtcaggagtttgagaccagcctgaccaacaaggagaaaccctgtctcttctaaaaaaaaaatacaaaaaattagccaggcatggtggtgcatgcctgtaatcccagctactcaggatgatgaggcaggagaattgcttgaacctgggagctggaggttgcggtgagctgagatcgcgccattgcactccagcctgggcaacaagggcataactccgtctcaaaaaaagaaagaaagaaagaaagattgattgtttggagggagaggcaaaggtccaaagtcaagaaggtcgatcaataagcaagagcgggtggcatcccaggcaggggaacagcctgggcatacgcagggaggctggaaagtacctttgaatgagtaggggaacagatagggcaagggcaggctggaagaaagagtgggtagcaagagatggcaggccttgaaagccaggccagagtgaagttttcttttcttttcttttcttttgagacggagtcacgctctgttgcctaggctggaacacggtggtgtgatctcagctcattgcactctccacctcccaggttcaagcaattctcctgcctcagcctcctgagtagctgggattacaggcgtgcaccaccacgggtggctaatttttgtaatttagtaaagacggggttttgccatgttggccaggctggtctcgaactcctgacctccagtgatctgcctgcctcggcttcccaaagtgttgggattacaggcgtgagccaaatgcccagccaagggtaaagtgtttagacttcaacgtgctttggtccacctgggaaactgaggcacagaagttggcccacccagcccagcggtcctcctaatcccacagacagtggggatggagattcagcaaggggaagaggtgggagtcaggtagcaggtagaatttgaacagcctgggaggtagctgcacacagtgacccccttccttattcctccccacagggattggttttcagagacatttcggaaagtgaaggagaaactcaagactgactcatgaggacctgaagggtgacatcccaggaggggcctctgaaatttccaacaccccagcgcctgtactgaggacgccctccatgtgtgtccaatgtggtcacacgcccaggtgtgaccaataaaaatcctatggaaaattctctctggccaggcatggtggctgacgcctgtaatcccagcactttgggaggct[136 bp omitted]aggcaggagaatcgcttgaaaccgggaggtggagcttgcagtgagctgagatcgtgccactgcactgcagcctgggtgacaagagccagactccgcgtcaaaaaaaaaaaagaaaagaaaattctgtctgactgcttcttcactgtggggcaggggtgccggagagggtaggggctgtgggagagggcaggggctgaaccttacggactcctcacaagccctccaatgccccatctacttgccctgtgctaaggatgttttaactctatggtctcaaaagaatcttcctaagaaccttgcaaactgggacttaataatcccataagggcattgaggcccagagaggtgaggctacttgtataaggtcacacagccaggaagtggagaactggaactagattgaaccctcagccaggcaatgtcactatgctacacttttcctagtgtggtctacccgagatgaggggctgaggttttttgttttgttttgttttgttttgaaacagagtttcgctcctcttgcccaggctggagtacaatggcaccatctcagttcactgcaacctccgcctcccaggttcaagggagtctcctgcctcagcctcccaagtagctgggattgcaggtgcgtgccaccatgcctggttaatttttgtatttttagtagagacgaggtttctccatgttgatcaggctggtcttgaactcctgacttcacatgatctgcctgccatggcctcccaaagtgcagggattacaggcatgagccacctcgcctggcctttttttttttttcttgagacagagtctcactctgtaccccaggctggagtgcaggggcatgatctcggctcactgcaacctccgcctcctgggttcaacagattctcctgccttagcctccctagtatctgggattacaggtgtgtgccaccacacccagctaatttttgtatttttagtagagacagcattttatcgtgctggccagtctggtctccaactcctggattcaagcagtcctcctgccttggcctcccaaagtggtgggattacaggcgtgagccactgtgcccagctcttacgtaaaattaaaccacatgcacatgcaaaacaaccctatgtaaaaaaaaaattttttttgagatggagtctggctctgtcacccaggctgaagtgcaatgatgcgatctccactcactgcaacctctgcctcccaaattcaagtgatttttttgccttagcctcctaagtagctgggattacaggcatgtgccaccacacctggctacttttgttgtatttttagtagagacagagtttcaccatgttggccaggctagtctcgaactcctgacatcaagtgatccgcccgccttggcatcccaaagtgttgggactacaggtgtgagccactgcgcccagcttaagattgcataagaacaatatttgaaagccatatatctaataaggggttaatattcaaaatatataagggactcctacaatgcgagtgggaacaccaaacactgcagccactgtggaaaacagtatggggtttcctcaaaacattaaaaatagaactaccaaatgatcctgcaatctcatttctgggtatttattcaaaagaattgaaatcaggaccttgaagagatacctgccctcccatgttcactgcaggtctgcttaatacccaagatatggaaacaacctaaatgtttatcaacagatgaatgggtcaaggaaatgtggtctatacgtgcaatggaatgtaaagcatccttaaaaaggaaaccctgaggccgggctctgtggctcacacatgttatcccagcactttcggaggtcgaggcaggaggatcacttgaggccaggagttggagaccatcctggccaacatggtgaaaccccgtatctactaaaaatacaaaaaaaatcagccaggcatggtggcgggtgcctgtaaacccagctactcaagaggctgaggcaggagaatcactggaacccaggaggcggaggctgcactgagcagagatcgtgccgttgcactccagcctgggcgacaagaacaaaactccatctcaaaaaataaaaaaaggaactcctgaagccaggctcggtggctcccacctgtaatcccagcactttgggatgccaaggcaggaggatcactcgaggccaggagttggagactatcctgtccaacatggtgaaaccctatctctactaaaaatgcaaacattagccaggcatggtggcgtgtgcctgtaatcccagctacttgggaggctgaggcgtgagaatagcttgaaccaggaggtagagactgcagtgagctgagatcatgccactgcactccagcctgggcgtcagag[138 bp omitted]aacactgtctctactaaaaatacaaaaaattagctgggcatg[135 bp omitted]aggagaaaaaaaaaaaaaaaaaaggaaatcctgaacctgggcatagtgtcttatgcctgtaatcccagcactttggaaggctgagatgggaggatcagttgaggtcaggagttcaagaccagcctgggtaacatggtgagacaccgtctctaccaaaaaaagaagaaagaaagagaataaataaattataaatattactctctggggttaatgcattcccttctcccccaaaatcaaccctccaaactcctatactctcctttcttctcactcagcagcctgttagaactcaagtcagattttttgtttttttgttttttgaggcggagtctcactctgttgcccaggctggagtacagtggcaccatctcagtccactgcaacctctgcctcccaggttcaagcgattctcctgctcagcctcccaattagctgggactacaggtgtgtgtgtgtcaccacacccagctaatttttgtatttgtagtagagacggggtttcaccatgttgcccaggctggtctcaaactgcccagctctagcgatctaccctcctcggcctcccaaagtgctggggttacaggcatgagccaccgtgcccagcctcaagtcagattatgctcttcctctgctcagaactctcctgattctctcagagcaaacccagaagaacttaccaaaggcctacaaacaggacactacccggttcacgatcgcctcatccctctctctccatcactcacaagcaactccttgctattcctccaatgtactgggcaggttcccacctcagggcccttgcagttactgttcctcttgcctggaatgttcttccccaggggtccagatatctgcctggctccctcctcacttcctccagttctcttccaaaatcatcccctgccagacatagtggcacactcctgtaatcctaacctttgagaggccaagatgggaggattgcttcagctcagaggttcaagaccagcctgggcaacatagcaagaccccatccctcctaaaaaaaattagctgggcatggtggtgcacacttgtggttccagccacttgggaggctgaggtaggaggatggctttgaatcagggaggttgaggctgcagtgagccatgttccaaattagatagtggtgattgtgcaaccttgccaata[137 bp omitted]aacatggtgaaactccatctttacgaaaaattaaaaaattagccaggcgtggtggcaagtgcctgtagtctcagctacttgggacgctgaggcgggagaatttcttgaacctgcggggcagaggctacagtgagctgagattgccccactgcactccagcctgggcaacagagtgagactccatctcaaaaaaaaaaaaaaaaaaaaagaaaaagaaaaaagggtaaattttatggaatgtgaattataactcaatttttcaacatgcattaggagggacatttcaaacccttttttaccccagccttccctgcaatcacccagagtatccagccaggaggggagtggctagagacaccagaagattagcagggaggagggtgcagggtttcgggggatgaggggatgggattcagaccagggtaaggatccaggggtagagagaaagatttgagagtggttttggggcttggtgacttagagaacagagttgcaggctctgtttttgggcccgccctgcccccttccgacctcttagttcctatcctccagcagctgtttgtgtgctgcctctgaagtccaccctgaatgaccttcagcctgttcccgtccctgatatgggcaaacattgcaagcagcaaacagcaaacacatagccctccctgcgtgctgaccttggagctgcggcagaggtcagagacctctcagggcccataccacttccaacatccccttgatctcttggattttggtggagaggggcagaggttgtcctggcctggttaggtagtgtgagagggtcccggttcaaaaccaccacttgctggttgaggagtcgtcagtaagtggctgcgcccccaccctgaggcttgtttctccatctgtacaatggaaatgatgaagatgcccacctgatagggtttttgtggcaaataagtaagtagtttttttgtttttctttttctttttttttttttttttttgagatggagtctcactctgtcaccaggctggagcgcagtggcgtgatctcggctcactgccaactccacctcccgggttcaagcgattctcctgcctcagcctctgagtagctaggactacaggcgcccgccaccacacccagctaatttttgcatttttagtagagatggggtt[133 bp omitted]agctctgtcacccaggctagagtgcattgagccatcttggctctctgcaacttctgcctcccgggttcaagcaattctcctgcctcaggctcccaagtagctgggattacaggcgcccacaaccatgcctggctaatttttgtatttttagtggagacagagtttcactatattggccaggctgatctcgaactcctgacctcaagtgatctgcctgtgtcagcctcccaaagtgctgtgattacaggcatgagccaccatgccccaccgcaattaagtaaagtaatcatctaaaagccctgccatggttcctgccacacagtgtgtgctggggaagcgcgcacgaattaaacagtagctggcgttgacggggcacctatgcggcattttctgtgcacgatctttactctccctggcaaccctatgaggtagatagtccatgactcccattcatggatgaagaaacaggcccacacaggtaaagcaacttgtaccaggtcataccgctagaaagatgtagagtcagccacgcgcggtggctcatgcctataatcccagcactttcggaggctg[134 bp omitted]gaggcagaagaattgcttgaacccgggagacagaggttgcagtgagctgagatcacgtcactgcactccagcctgggtgactgagcaagactccatctcaaaaagaaaaaaaaacaggccaggagcagtggcttacacctgtaatcccagcactttgggaggccaaggcgtgtggattgcctgaggtcaggagttcaagaccagcctggccaacgtggtgaaaccctgtctatactaaaaatgcaaaaattagctgggtgtggtggcaggcgcctgtagtcccagctactcgggaggctcaggtaggagaattgcttgaacccaggagatggaggttgcagtgagccgagatcgcgccactgcactccaacatgggcaatagagcaagactccatctcaaaaaacaaagaagggagggagggaaggaaagaaaggaaaagaagcaacaggtagagtcaggctctgaaccccacaccaatcataacacaacacacagtaggtttgtttttgttttttattttgggcttttgtttgttgtggagacagcgtcacccaggctgtaatgcaatggtacaatcatagctcactgtagccctgaactcctagactcaaacaatcctcccacctcggcctcctgagtagctgggactacaggggcatgccaccacgcctagctaaattttttttttttatttttagtagagatgaggtctccctatgttgcccagattagtgtcttaactcctgggctcaggtgatcctgccaccagggattacaggcacgagccaccatgctggcccttgttttttgttgttttttttttttttttttgagacggagtctcgctttgtcgcccaggctggagtgcagtggcgggatctcggctcactgcaagctccgcctcccgggttcacgccattctcctgcctc[302 bp omitted]gcctcctgagtagctgagattacaggtgcccaccacgatgcccagctaactttttttttttttttggtatttttagtagagacgggggtttcaccatgttggtcaggctggtctcgaactcctgacctcgtgatccgcccgccttggcctcccaaagtgatgggattacaggcgtgagccaccgtgcccagctttttttttttttttttaagagacggggtcttactatgttgcccaggctggactctcaaactcctgggctcaaggaatccttctaccacagctttctgagtagctggggctacaagcccctgccacagtacctggctgtttttgtttttttataattgtggtaaaatataaacaacatggccgggtgtggtggctcacgcctgtaatctcaacactctgggaggttgaggtgggaggattacttgaacccaggagttcaagaccagtctgggcaacttggcaaaactgtgtttctacaaaaaataaaaatattagctgggcagccaggcgcagtggctcatgcctgcaatcccagcactttgggaggctgaggtggatggatcacctgagaggtcaggagtttgagaccaccctggcca[224 bp omitted]gaggccggagaatcgcttgaacccgggaggcggaggttgcagtgagtcaagatcgcaccattgcactccagcctgggcaacaagagcgaaactatgtctcaaatacatacatacatacaaaaaattagccgggtgtggttgccgcacacctgtaatcccagctacgcgggaggctgaagcaggagaatcgctggaacccgggaggcagaggttgcagtgagccaagatcacaccattgcactctatcctgggtgacggagtgagactctgcctcaaaaaaaaaaaaaaaaaaaaaaaaacttaaccattgcagccatttttaggtgtacagttcagtggcattaagtacattcacactgttgtgcaaccatccccactatttgcaggatgtcttcgtcatcccaaacagaaactctgggtgttttcaatctgctgatgattgctacagaggaattccaggggacatctgttgcgcacctactgtgctcacgctggggcctctgggatggacaggattctgccaaggcagacatctgggtcaagacagtcctgcacagttgttcaggttgtggccaaggttgcgtttgcagatttgccatgtaaaaatacaggatgctcagttacatttgaatttcagattaatagcaaaaaaaactttttggtataattctgaaatatttcatgggacatatttatactaaaacgtcatgcactgttgatttgaaattcaaatgtaattgggcctcctctatttcgtc[212 bp omitted]gaggcaggagaatggcgtgaacctgggaggcggagcttgcagtgagccgagatcgcgccacagcactccagcctgggcgacagagccagactctgtctcaaaaaaaaaaaaaagaatccagtccatagtcccctgagccatgtgccctggggtgcagctgggtccttcaggagaaaaatgctctatttctggcactgggaccgagcctgatgtgggttttttgttggtttttg[212 bp omitted]gtgcacctgcagctctcctgcataggcctcagccgtcctgcatgaggacactgggaggcaggtgctccctatcaaccccgtgttacagttgaacaaactgagccccagaaaagaaaacgtatttgcccaggtcacacggtgaagaagtgagggattcgaagcccaggtccatctgaagccagagtcacccagaggagaaagagttggaattgagaactcaaggaatgcttggaagtgatcgggctcgagcccacctaggaagaaacagaggctggagacatgagactgtgttgctatttcctctcatcaacccttgggccctattgaggccctaccacaagcctggccctgcagcccagtgactaggagaaattagacacaagataataataacagcaatgatcttttttttttttctgagacggagtcttgctctttcgcccaggctggactgcagtggcgcgatctcggctcaatgcaagctccacctcccaggttcacgccattctcctgcctcagcctcccgagtagctaggactacaggcgcctgccaccacgcctggctaatttttcatatttttagtagagatggggtttcaccgtgttagccaagatggtctcaatctcctgacctcgtgatccgcctgcctcggcctcccaaagtgttggggttacaggcatgagccaccgcgcctggccaacagcaatgatctttgagcacctatattgccagtctccacggtaagagctttcttcattttttgttttgttttgtttcaagacagagtcttgctctgtcacccaggctggagtgcagtggtgtgatcgcggctcactgcagccttcacttcccgggttcaagccattctcctgcctcagcctcccaagtagctgggattacaggcacgcatcactacttctggctaatttttgtatttttagtagggacagggtttttca[141 bp omitted]cctcccactttatggaggaggaaactgaggccagcaaatgaggctgtcatgggaggtggagacaggatttgaacctgcctcagtgcaggaggctcaagagcctctgtcttctctcagggcactgtgtgggagggtgagaaggagggaggcccacagaggcatgacctctgattgccactgtcacctgggccctgctctctgaagtctctgccaagcggggaggtggccgggggagggccctgctctgtgcagcctcccctcccccggcccgcagagttgagcacagagggacagaggcacggaacccccagaaatgtccctcctcagaaacaggctccaggccctgcctgccctgtgcctctgcgtgctggtcctggcctgcattgggggtgagaagaagtgggtggagggatgtggggcccacacctggtgggtgtgagtgtggctgtgtgtcctgtggctctgtagccacgtgagacatgagtacggagtgtgtgcgtttcatggcgtgcgtatgcatgtgcgtgtcggggagtgtgtgtgtcggtggctgagagtgaagtgtgaatgtcacattggtacaaactgggatcatctgtgtgtgtgcacgtgcgtgcgtggaagtgggagtatgcagtcgtggtaaaaaagtgcatgtctgtgtgcatatgtgtatttgtgtgcacctgtctctctgtggggtatgtgtgtgcaaaatatttgagtgtgtggacatgtgtgagggggtgagtgtgtgctggtgtgtacgtctgtgttttgcatatgcatttttttttttttttttgagacggagtctcactctgtcacccaggctggagtgcagtggtagcagtggtgcgatcttggctcactgcatcatccgcctacccgtttcaagggattctcctgcctcagtcttcagagtatttgggactacagacacacgccaccatgcctggctaattttttttttttgagacggagtctcgctctgttacccaggctggagtgcagtggcgtgatcttggctcactgcaacgtccgcctcccgggttcacgccattctcctgcctcagcctcccgagtagctgggactacaggagcccaccaccacgcctggctaattttttgtatttttactagagacggggtttcgccgtgttagccaggatggtctccatatcctgacctcgtgatccgcctgcctcggccttccaaagtgctaggattataggcgtgagccactgcgcctggccaatgcctggctaatttttttatatttttggtagagacagggttttgccatgttgcccaggctggtcttgaaatcctgacctcaggtgatccgcccgccttggcctcccaaagtgctgggattacaggcatgagccaccacgcccggccatgtactttatgttaaaatgggatcatattctagatcagcattatccagtagaaatttaaatttttaatacagggccaggcacggtggctcatgcctgtaatcccagcactttcggaggccgaggcgggtggatcgcaaggtcaggagatttgagatcatcctggctaacagatgggtaaaaacccatctctactaaaaatacaaaaaattagccatgcatggtggcatgcgcctgtagtcccagctactcgggaggctgaggccggagaatcacttgaacccgggaggcagaggttgcagtgagccgagatcgcgccactgcattccaacctgggtgacagagcgagactccgtctgaaaaaaaaaaaaaatttaacacgtatgtagacaatgtgcaaggcaccattccatgtgcatcgtatgtagtaactcttaattctcacgataaccctgaggtagatattattaccccgttctacaaaaggagaaacagtcctggggagacaggataagtcaccggccaaggcacacagctagctacatgtggcccccgcgtgacggctggtctctgtaggcgaggctttgtccagatgcgtgggtagaaggtctggcccggaaagaggaactgacagcaaggctaagccaatgtctgcccctgggggcagaaagtcacctcctgctctccctccactgtccacagaggtagctcagacagggtgggggtcacaggagaacgaagggagaagggggtagttcctgggcagcaaaatcaggtggtgaagggaggcatcagaggatggcaattagagaggccattagaggggaaccacaggcagacagggtgacaggagggactactgacacaaggtgaagagatggcccagccggacggggtggctcacatctgtaatcccagcattttgggagcccgaggtgggtggatcacttgaggtcaggagttcgaggccccaacatggcaaaaccccatctcttctaaaaatacaaaaattagccgggcatgatggcagatgcctgtaatccctgctactcgggaggctgaggcaggaaaattgcctgaatccaggaggtggaggttgcaatgagacgagatcatgacactgcactccaccctgggcaacagagcaagagactgactctgtctcataaaaaaaaagaaaaaagaaaaaaaaaaagagatggctgatggttaaagaggggttagcggtcaggggacacataagggtaaaggcaggaggcaagaggactggcagggggctgcccctgggccaccgggagcgacacaggatgagcatggagggaaagggagaaggggattctagggtcccagcctacccaagttgccctctggttccacctagcatgccagccagaggcccaggaaggaaccctgagccccccaccaaagctaaagatgagtcgctggagcctggtgaggggcaggatgaaggagctgctggagacagtggtgaacaggaccagagacgggtggcaatggttctggtgagggtgtgctgggctgggtggtgggaggggactcctgggtctgagggaggaggggctggggcctggacccctgagtctcagggaggaggaaagggtgggagtggggctgtgacccctaggtctgggaggagtggagggttagagctgagagcaggaactcctaggtcacagagaggagcggataaatggggcagagaacacctggggagagctggggcctccactgtgatgtcctctctcctgtaggagcccgagcaccttccggggcttcatgcagacctactatgacgaccacctgagggacctgggtccgctcaccaaggcctggttcctcgaatccaaagacagcctcttgaagaagacccacagcctgtgccccaggcttgtctgtggggacaaggaccagggttaaaatgttcataaaagccaggtgtggttgtggcgggtgcctgtagtcccagctactcaggaggctgaggtaggatgatggcttgagcccaggagttcgagaccagcctgggcaacacagcgagatctcttgggggtaaaacaaaaagaaaaaaaaaagttcatacttctccaataaataaagtctcacctgtgtccctgtctggatccttccccagtgtggccagaaaaaaacccaccccactgcctcccaggaatcaatgagtagaagaggtgacacctgatggggaaggaagagtagggaggtcgggaagggtatcaaggaataacaccctattgtgggcttgcggagaatgggggacttcaaggcgtgtcagtttcaggagggtgagggcaggagcgtgggtggagtcagcaggtccccatgatggccctcactgagagcttcgcccttgtctcctacaagctctgactccattcccagtgggcacccagcacctccaacccctccacagcccccaacccagcctctgtcggaggcgaattctcagagtgagggttccctgtcacttgagagaaggttccctgtgacgtgaccttgggggacgtcattgccctttctgtccccacccaccccctccgcagttctgttggccaggactttggcctagacaaaggatgggggttgtggctgtggagcggaagtgggtctcaaccactataaatcctctctgtgcccgtccggagctggtgaggacagcctgccagagtctggtaagaaagggactcagggtgcggggacaggggggcgtcagcagggagagggcaaagatcgataaagcaggaattttaagaggcacaatattagaagcccgtgttggaaccatgactgtgtgtgtgtgtgtgtgtgtgtgtgtgtgtgtgtgtgtgtgtgagagagagagagagggagatggagtctcgctatgtagcccaggctagactcaaactcctgggctcaagcaatcctcctgcctcagcctccccagtagctgggactacaggtgcaccaccacactccacaaatcacagaatttagaactgtagactatttgagcttctgcttagagttagggtggctgaggtggggaggatcccttgagcccaggagtttgaggatgcagtgagctgtgatcttgccaccgtgttccagcctgggtgacagagaaaccccatttctaaaaaagagaaagaaaaagggataggtacaatggctcatgcctgtaatcccagcactctgggaggccgaggcgggtggatcacttgaggtcaggagttcgacaccagccttaccagcatggtgaaaccgcatctatactaaaaatacaaaaattggccgggtgtggtagcatatgcctgtaatcccagctattccagaggctgagacaggagaattgcttgaacccaggaagcggaggttgcagtgagcccagatcgtgccactgtactctagcctgggtgacagagcaagactcagtcttggcggaaaaaaagaatgaaaaaatttaaaaaactaaaaaagaactgtaggctgggcgtggtggcttacacttgtaatccaaacgctttgggaggcca[134 bp omitted]gaggcaggagaatcgctcgaacccggaagacagaggttgcggtgagccaaaattgcgccatcgcactccagcctgggcgagagaacaagaccttgtcttggaaaaaaaaaaagaattgtagaccatttgcttgtgttctttctccggggatcagatctcaccctctttctgccgtacttcctcatctcctacgtgtggatgatgatattgtgccctgtgcatgttcttcgtcaccaaaagtgcctctctcatagagcaggtgagaactcagtgaggagatgcagggacatgaggtctgacttagggcagagccctaaggtaacacatttgatctactgtaggtccttaatggtgtctgcagagcacctccctgcactgactcagccttagcaaagggcagaggctttgctgtgttccctgctgggcccagaactgtttaggtgctcaagaaagccttctaggctgggctcagtggctcacacctgtactcccagcaccctggggaggccgagatgggaggatcgcttgagcccaggagttccagaccagcctgggcaacaaaacaagtctcccatctctacaaaagaataaaaattagcagctgggcatggtggctcatgcctgtaattccagcactttgggaggccaaggcaggcaaatcacttgaggttaggagttcaagaccagcctggccaacatggtgaaaccccatctctactaaaaatacaaaaatcaggtggggcacagtggctcaagcctgtaatcctagcactttgggaggccaaggtgggcggatcacgaggtcagaagttcgagaccagcctggccagcatggtgaaaccccatctctactaaaaatacaaaatattagccgggcatggtggcaggtgcttgtgattccagctccttgggaggctgaggcagaagaattgctagaaccctggaggcagaggttgcagtgagccgagaacacgccactgcactccagcctgggtgacagagcgagactccatctcaaaaaatacgaaaacaaaaatcagccgggtggtggcgggtgcctgtaatcccagctactggggaggctgaggcaggagaattgcttgaacctgggaggtgggggttgcagtgagccaagattgcaccactgcactccagcctgggcaacagagtgagattccatctcaaaaaagaaaaaaataataattaaaatgttaaaatcaggagtagaatcacagaatgttggaaagtgaggcccaagaagggggctgtgtccaagtccatgcatgggaaacttgactgggacaccgagctcacacagagcaggatctcagtcccccccaccagagtggggcgtgaccacaggaacagccgcctccagtcagcctgccacatgacaccccctcaatgttccaggtctctggacactatgggcacacgactcctcccagctctgtttcttgtcctcctggtattgggatttggtgagtgtgggcttccggggagggaagccttggggaggggaatgagctccaagcatcttcccagcccaggcccttcttacctctgcctctgccctctcctcttcttccttcctcctttccccctgctgcagccccacgggctctcctgacacactctccccctgcagaggtccaggggacccaacagccccagcaagatgagatgcctagcccgaccttcctcacccaggtgaaggaatctctctccagttactgggagtcagcaaagacagccgcccagaacctgtacgagaagacatacctgcccgctgtagatgagaaactcaggtagcacctgcccctggagaaatggggtctggcccataccaccgactgcatccaggacccagaagttcaggccccagcccctcctccctcagacccaggagtccaggcctcagcccctcctccctcagacccaggagtccaggcccccagcccgtcctccctcagacccaggagtccaggcccccagcccctcctccctcagacccaggagtccaggtccccagaccctcctccctcagacccaggagtccaggcccccagcccctcctccctctaaccatctgtgctttctccccagggacttgtacagcaaaagcacagcagccatgagcacttacacaggcatttttactgaccaagttctttctgtgctgaagggagaggagtaacagccagaccccccatcagtggacaaggggagagtcccctactcccctgatcccccaggttcagactgagctcccccttcccagtagctcttgcatcctcctcccaactctagcctgaattcttttcaataaaaaatacaattcaagttgcttctcatggatggcactgcttttctgaggactcaagggccaagatggaggggctgactcagtccagccaacatttaatgagcacctactttatgtatggagctctaacccatgggtccatgggaataaagcagtgaatagtaacaataaataatcgtaacagcaattagagactaatctttattgaagtccggctttctctcttttatttttttattttttgagacagggtttcactctgtcacccaggctggacagcagtggtgcaatctcggctcactgcaccctccgcctcccaggttccagcgattctgtgtgcctcagcctctggagtagctgggattatgggcatgtgccactgtgcacggctaatgtttgtatttttagtagggttttgccagttggctaggctggtctcaaacttctgacctcaagtgatccacccgcctcagcctcccaaagtactggggtgacaggcatgagccaccgcgccatgccaaaatccagccttctcatttgtaaaataacaaatcatagacacagctagtccacagtggcctctgacagtctccagttgttaacggtgaatggtgtccaggtttttggcgtcctgaacaaagaactggacaaaacgcacaaacaaagcaaggaaggaatgaagggatttattgaaaacgaacatacactaaacagtgtgggagcgggcccaagcatatgggttcaaaagccctgttacagaatttttgggagtttaaattccccctagaggattccccttccactggttacttctggtacaccctatgtaaatggagaggatgaagaaaagttacaaagtcatttatggcctaccggagaggatgtttcctgttatagctgaagtgaattggccttatgttccctgcctccctattttcctgccttacagttgctggactgacacattttttattttatttattttgttttgagataaggtcttgctctgtcgcccaggctgaagtgcagtggtgagatcttggcttactgtagccttgaccttttgggctcaagagatcctcccatctc[131 bp omitted]accttgcccttccaaagtgttgggattacgggtgtgaaccaccgcaccaggcctgggctgacactttaaacgtgccattgcaatcagtgtataatggtcccgtggcagagggagaatggtgcccaag[132 bp omitted]gccaacatggtgaaaccttgtctctaataaaaacacaaaaattagctaggggtggcccgcgcctgtaatcccagttacctggaggctgaggcaggagaattgcttgtaccctggaggcggagatagtgccactgcactccagcctgggcagcagagtgagactccgtctctaaaaaaaaaaaagaaaaacttattaaaaaaaaattgcaagcaaaaagcacagaaggcagaaggtgcaaataagcagaggctccatggtctgaaggaggccagtgctgggaccatgaatgaagggggctgggggccaagattcctgtatcctgagggagtccagggtggtactgctccccaagtcccatgggtggggctattggtctctggggatccactgcttgtatttctcctaatctgcttggcattaacctcctgccaggctttcaacacccttggggcagttttcccaggtcctgaggctgggcagctgagtccagtaaaaaacaggggccctggagagggactgtgggcaatgcccccgagtccccggggcctgggaagaacagaggctgccaagtgcagggggtggtggggaggggaagaccctggagtaacaatccctgctgtgtccacttggttcccacggactcaagccaagccaaagcactgcccggaccagttcggcttccaaccaatcctggtgctggcctcagactcctcctttctttctcagaaccccattcccctcagggcccccagagtccaggcccctagattcttcttcccctagaactcaggagtctgggaccccccagtcccttctcctcaggacctagaaggttggatccccagccccctttctcccttagaacctgaaatcacagcccttgatcagtattttgcgccccctagtggagagaagagtgggtctgtcctgtgacttacatacagcaggaatggcagaattttttacttattatgatttttaatttctttagagacagggtctcactctgtcacccaggctggagtgcagtaatgtgatcacagctaattgcaacctcgaacgaactcctgggctccggcatccctcccacctcagcctcagagtagctggaccacaggtggatgccaccacaccacctaattttgttaatttttagtagagctaggatctcgctatgtcaccaaggctggtcttaaactcctaggctcaagcgatccttctgcctcagcctcccagagtgctaggattacaggcatgagccacgaagcctggacggaatggcagaatttatttggtcactccacagagcataggaaggctctgcagggaacctgcctccacaggagccctgtccaaggtcacacttctcatgagaagcttagacctcatcatgctccaacacattggcccttgcagtgtatgagacttggagagcagattgcagcagtttgtatttatagctgagagcgcagttggggttgcagtgaggctggagaaagtttcaaagcccctcacttgcctgggctttccatggtcctctacctaaatttgtacaagtcattttgtactttttttttttcaagacagagtctcccttttcttgcccaggctggagtgcgatggcatgatctcggctcaccacaacctccgcttcccaggttcaagcgattctcctgccttggcctcccaagtagctgggattacaggcatgtaccaccatgcccagctaattttgtacttttagtagagatggggtttctccattttggtcaggctggtctcgaactcccgacctcaggtgatccaccagcctctgcctcccaaagtgctgggattacagtgtgagccaccacacccagccaattttgtactttttaaaagaggccaggccaggcgcggtggctcatgcctgtactcccagcactttgggagaca[134 bp omitted]gagacaggagaatggtgtgaacccaggaggcggagcttgcattgagctgagatcatgccactgcactccagcctgggtgacagagcaagactccatctcaaaaaaaaaaaaaaaaagaggcccacaaaacacataagcttcagaccccacaaagtctctcctcaatccctgtcttagtctattcacttcatccctggacttaaaagactgggcctacacattcaaagaatcgttattaacaccattattgtctgtaacagtgaggatgaggcactgagttttctttttcttttctttcttcttttttggaggtggagtcttgctctgttgcccaggccggaattcagtggcatgatcttggctcactgcaacctctgcctcccgggttcaagcaattctcctgcctc[225 bp omitted]ccctcagagaggtaagtcactcaccttctgcacctagagagcctcatccccagggcaatcatccccagggcagtgctggagatacagcagtgaccacaacagtcccaggtcagcctgcccagttggggagacacacccatccctgacagtgatgacacaaagtgagcagggatggggtggaggagctgagggggcaagggaggataggaaaagggctcagagagagtttcctagagcgagagctactgttacagggctgagacctagaggaaagtggaggaaaccgataataaaatgataattatatattcagaatatcccaatgcaaagcttactctttttccaggtaatatataaggttcataatcacagcgctccaaatattgaccacttaagcatgaggcccagggcctgatgttttccattcgccatctaactacgtcttcccaataacacagcggggcaaaacgggaagacgaagaacgagtacgattatatccctggtttataaaaggggagaaactgaggctcaaacatagatgtcacttgtcaccagcctggccaacacggtgaaactccgtctctacttacaaaaaaaaaaaaaaaatgggaggctgacgcaggagaattgcttgaatccgggaggcagaggttgcagtgagccgagatcgcgccactgcactccagcctgggtgacagagcgagactccgtctcaaaaaaaaaaaaaaaattagccaggagtggtggcgtgctcctgtaatcccagctactcgggaggccgaggatgcagtgagccgaggttgcagtgagccgagatcgcgccattgcactccagcctgggggagagtgaggctccgtctaaaaaagaaaaaaaaagagagagagagacgtcacttgtccaggatatcttatccagtcagtagcaccacaagggttagaaccctggccagacatccacccaatttcacgggtgaacagttaacagcctctgagagtcttgtcctctctgggcctccgtaacaccctctccaaactaagggtctctcagcagatggccgggtttagagctgtacgaagacacacagctaatgaaaaattgtggaattctcagagcccgtgaagcctagcccacggatgcgaggtttggaccactgagggaacgcgcatgcgtgctaggcagggcagtccgaaggcttgggggtgtatcatagggtctcatcggaggtttgttggccgtaagacccctggaattggaactctaaaaacacagaaaggatatgagctcaggagacttgaacgaaagagttgtcttaggaagaggggtcagaagacaagggtgctgggcaaaaggctagttcttcgaatcagaatacggtggccagaaaggttcctctgacgaaagaggggcgtggttcgaagccgtacagtggccggtaaagctcaagaaacatggaacgaaaaggacgcgaagaatcggcagggagaagcggacaggatgtcccgaaaggctcatataaccgaaaaggcgggttaatgtgaagggacggaagggacagaacttgcgggaggcacatgctggccgagaaagtcctggagttcggagcatacagtgtttttattaggtggaaacaaacgggctgggagaaagacgagtacggtggccaggttggtccttccatagccggaagtggccttcctgagaggcgtggctgcggcactcttgccggatagggtggcccggcggggctaggaaagcgtgaaatctcgcgcgattgcgctgcgaagtcggggacggggcggggctggcggcgggggcggggacccggagcgggaagatggcggcggcgcaggaggcggacggggcccgcagcgccgtggtggcggccgggggaggcagctccggtcaggtacggaggccgagaggggactgagggggttcttccccagccggggggcctcccacggggcgtgtcctacctcttgtcacggaatcccgtgcactgggggctccttggccagagggaccttgaatacccggcccaggcagggccggaccgcccgggaggccggacggtgccgggaacagggccctgttgcgggtcggttcccctgcacgctcgagccgggcggccaccaggctcattgctcgatccggggagacagtggctcggaggggcgcaggcttgtaccttggcgcgctgggttctcaactccgcgattccatgctctgaggccgttcctagagtggtctggcgttcaggtctcgttgtagtgtttgaggtgtgcgcagtgattaattgggagttttctagctgtggggaagtcagtattagcagggcacggccgacagacccattttacagacgggaattcaaggaacagtgagactaaggcgcttctagaaggtcatcctggttaggtttgtaactttatgtagaagttacaagacactgctgacacagggactggtatggttgtggttttaatgtaaaatagttctatgggttaattagtcctggtgcggatgacttctgccccactgctgtcttaacacactgcagagcataccatttcaggcagctaccgttcaggcatttggggaatagatggagagacatgaaggtgctgtcgacccacccactgggatgtcactgacatgtgggaggcagctcaggggaaaggagtgcgggttgagaggggagaatgaagctgactctctgtgtgaccttgggcaagttcctttccctctttaggcctttatctctcccgtgttaaatgcagaggttggacaggagggccagccatatccctgctgtcaggggacgaagagaggagactgacatgtaaacagttgtaatcctgaatgattaggttggtgacaaaagtctgtgtcagggactgggggagcccagagaaagagcaagtggtatcacttgggtaggacacatggatgaaatttgtgtgatagagcccactgtatctgctctgaatcttttcagcattctcagccagggcctggcttcagggacagcttaggaaatgtttgttgagttagtgctggaatgaaggctcagttcctgtcttcaagggtttcccagtcttgctgaaaggaggtcgtttcccctctgggtttctgttgattattgggttgatggtggcttgagagaccagggcccaggttgttctcattgccctgagcttccagatggcactctgatcttctcttgtaccaactctgcttaaaaacaatcaagagttacccctttgcctttaggacaaagtacaaattctttaataaatcacagtcttgcacgatccgacacttttcttcagactagactaggatttctcgagctcggcactatcaacattttgaattggataatgctttgtttggggggctgccctgtgcattttaggatgtttagcagcatccgtggcctctacgcactagatgtcagtaggatccacgcccctccccagttgtgacaaccatatatgtctccagacattgccaaatgttccaagagcaggggggcaaagccatccctgcgtgagaacaactgcgctaaaggggatccgctgctctgaacctattttatttctaaacctcttttattgcctctcagtctctttcctcatagtctatgcacaggtctctcccctctttagctagttgatgtgtattagtcctacagatttcagatgtcccttcctgcagaaagccctctttgactgtctgggctccgctgtcccagccctgccctactgggtttcactgtctggggactgggaaccccaggagggcagagccaggactgccttgatcaccactgcttccttagcaccactcagctcagcgccaggcacagaggaggtgctcagtgtttgtggaatgagcggatcttgaaacagaggctgggctgaggtggaattccctgatgccgtggtggatccaggtaatcagtgaagacatgccgcaaaacctagcttcctcctgctcttgcctagccctggtggtctcagctacttcttggaccctttagcagatgttgctggggattgtgtgtgtgcgtggacgtgcagatccgagagcaggaactgtgtcttagtcactgatgtgtccacagccactgccacccttctcccatgcccagggcctagtgcacagcaggcacaccctctgcacagtctgctgctttagctagcctgctcctgtagccaggaactcggacacagaacccacagctttgccattccttccttcagcgaatgcgaattgagtctactccatgctaggcctttgctgatgctggagatacagctgtgaataaaataggtgctgccctcttgaaggcccttacacttatgttctagttggagctgaatttataggggaagcacagacagggacacacagtgaacaagataaataagaaaaacagcagttcagatggctctgcgtgccatggacagaaataaagctgggatggggataggaagtgaggggtgggtagaagagttgcaattaaatagggtagtctagaaggcctctctgaggaggtgacgcttgaacaaagacctgaaggaagtgagagagggagtcccaaagatacacgagggaaaagcttttcaggcaaaggagcagccagtgcgaaggccctaaagtgggaggtgcctggtgtgatgaaggaagggcgaggaggctggagcgggtgaggggagaggggtggctggggacagatgcagattatgccaagctttggaggccatggggaggacttggcctttactctgagggaaataggagctgaaaagagtgactctttttttttttttcttttttctgagacggagtctcgctttctcaccacaatctcggctcactgcaacctccgtctcctgggttcaggcaattcttctacctcagcctctcaagtagctgggattacaagcacctgccaccacacccagctaatttttgtatttttagtagagacagggtttcaccaggttggccaggctggtcttgaactcctgacctcaggtgatctgcccacctcggcctcccaaagtgctgggatttcaggcgtgagccaccacgtccagccttgtggtataatttagatggtataacgttcacctgttcttaggatagagtccattggctcctggtccatttatgcagttgtgtggtgcagccatcaccacagtctggtctgagaaagcttctgtcccctcaaaaagttcccttttacagtctctgctgctcccaatcctaggcagccacagaggtgctatctctgtaattttctaaaaatgtcttaaacaaggatctaaacaacatccagtcttttgtgtccagcttctttcattgggcataatgggtttgaggttcatgttgttacatagatctgcagttgttcatttttattttattttttacaacctaggatcagggaaatttggcctttggggaaatcctaaagtacgtgctcacagttgttccttttcactgctcagtggtagtctgcagacatgacacagtttattctttcagtccttgaaggatatttggattgtttttagtttttgtctgttgccaataatgctgctatgaacattcatgtacaggcttttctgtggctgtattttgtttctttttttttttttctaagtaagagagacagggtctccctgtgttgctcaggctggtctcgaactcctgggctcaatggatcctcctgccttggcctcccaaagtgctaggattataggcatgagccaccacacctggccactgtttgtttttgagacagagtcatgctctgtcgcctaggctggagtgcagtggtgtgatcctggttcactgtagcctcattctccaaggctcaattgatcctcccgtctcagcctcctgagtagctgggaccacaggcatgcactaccacacctggctaatttttgtatttttatagagatgaggtcttgctgtgttgcccaggctggtcttgaactcctgggctcaagcagtcttcctgccttggcctcctgaagttctgggattataggcgtgagccactgcgcctggtctggcttcatgttttctgcctcctgggtagccattcaggatgggtttgctggattgtgtagtaggtgcacatatgacttgttcaataactgccatattttccgaagtagctgtacttttactttcccccctagcagcatacgagggttcctgtttttccacatccctgccagcacttgtgattgtctttctgctgatagccatcctaataggtgtgaagtgacacctcattgtggttttaacttgcctttccgtgggaaggttcccagccagattgcccatcactaacgggtaagcgaagagacctgggagtcagtcagatgcagcttcaaatcctgacctggcatcaagtgtcctttcctgaccccaaatcagctcagacccattgaaacccatacttggacccctaaatttcccaatagctaggctggccttgaggagggggccttgtgcctgtctgatttcccttccccagccgacccccgccccatagatctcctcatcagaatgtggctttctctgtctcagcctaagggtctcacccagacgacccagacgtcaaagggagctcctcagggaggcctctctgaccacccactccaaagtggatccctgttcccaactcagttgctgtcacttccccctgcttgttttccatgtaccatttttaattatcctgtttaccgttctagtgtgtttccttctagatccccagctctgggtaagcagggcccagatttctgtctaaaatgttccagtattttcacaacctggtccacaggtcagagaggtgaagtgatgtgcccaaggtgtcacagccaagaacggtgggaccaggactatagctgaggtctgtttgaccctggagcccctccaatggtgtcctgtgctttgggagattacaggaaagagctcttgctggtgaaggggacaggaggtgacaagtgacacatttaacacatgtagcccctctaaccatgctcctgggacatttgctatctggtgggtaaggtgaatggagaaaacattgcagaggagtggactaggggctgtggaggagagggccagacactggagcctcagagggaagtgggtttgggtgacctgagcgtccggggtgagtccttcaggcagcggtggccacacaggtgtttatcacagccttgctctgtgccactggtgctcttgagctaactgtgactgtgatagccctggtcctgcctcttgaaggctgatggctgaggggacagctgggaggaggggtgaatgagaacaggactggggagctagcagggtgcgtgaagggtgagcagaacatccccttccaaacctggcattcagagagtctctgattgtgaccttctgtgtctgagtgaagagtcctcctctgggaagccgtgcctggctcccttgcctgccccccttcccttctgtcattctgcttctgcggtccttcctgagtgaccagacaagtggcttcacctctctgagcctccctttgctcagcagccggatggagctggtcatagttttggcctcaggattagtgtgctgtgtgctgtcacagacatgtcttgtggccgtggcttatggtagcagctgatagtctggttgtgtttttctgtgtctgtcccacctgctggaccaggggcccttggagggcagggttggccacagagggggcctcaggaatggtttgcccagggaaggctctttcagctaagccccagccttgaagaatctggcacctgccataagactccttctgttgttgtccccaatagccacctccttgcatcctggctccagccccagggaacagtggacagtcatcagaatcagactgtgcctctaatcttctgtttctgcacctgctgcttctctcacttcctcctttgtgccaccaacttgctatgttttaggtctcagcttcaatgcccccttctccaggaagttgccccgaaccctagactggaccaggtgcctctcagggctcctgcattcctgccccgttctggacagtcactgtctagagatgaatctttctcccccaccgggctgttaaaccccaggaggacagcaaaagactctctaggtcaccactgtccctaggtcacagaggtgctctgcgagtgttttcctcctaaaagaagaggaccgcaccttcccaggtgttttcactgattcattctccagttattgataagcacccactctttgcccagcctgtgcctggccttcatgcatgatggtgtctaagacagcccccgtgtccattctccctccttaccctggcctctgtcccccacaggtgaccagcaatggcagcatcgggagggacccgccagcggagacccagcctcagaacccaccggcccagccggcacccaatgcctggcaggtcatcaaaggtgtgctgtttaggtgagcagacgggacttgggtttgttcaccgaaaacattcaaataaaaataaggaagaaaggaaaagtcagctgatcagctgaggatggtgatcattactgtatggtagagttgctttttttctttttttttttgtatgatggaatgttttctaaaccttttttttactctggtaaaacatactgaagtagggagtctccctgaacctgttctggtttttggggggctacctgatttgtgaaaaaataaaaacacaaaaaatactgaagtagtttgctagggcccttgtatcaagtaatatagacggagtagcttaaacaactgaaataggaaattcattgtcttacagttctgaaggctggaagtccaggatccagctgtgggcaggggcagtttcttctgtggcttctctcctgggcttgcagaaggccgtcttctccctgtgtcttcatgtggtctttcctctgtgtgtgtctgtgtcctaagctcctcttatggggacactagtcatactggcttagtacccaccataatgacctcactgaaccttacttttttacagaccctatctgggccaggcacaatgactcaccctcataatcccagcattttgggaggccaggttggaaggactgcttgagcccaggagtttgagaccagcctgggcaacatagtaagaccctg[145 bp omitted]aataaaaaaattccggaggctgagacaggagaatggcgtgaacccgggaggcggagcttgcagagagctgagatcgcgctactgcactccagcctgggcaacagagaaagactccgtctcaaaaaaaataaaaaatacaaaaaaaatacaaaaattagctgggtgtggtggcacgtgcctgtagtcccagctactcaggaggctgagggcaggagaatcgtttgaacccaggaggcagaggttgcggtgagctgagatcgtgccactgcattccagcctggggacagagtgagactccatctcaaaaaaaaaaaaaaaaaaaaagccaggtatggtgacacgtacctgtagtctcagctattcaagaggctgaggtaggaggatcacttgagcct[137 bp omitted]tgcctcagcctcccgagtagctgggactacaggcacccgccaccacacctggctaattttttgtattttcagtagagatggggtttcaccgtgttagccaggatggtctctatctcctgacctcatgatccgcctgccttggcctcccaaagtgctgcgattacaggtgtgagccaccgcacccagcctatttttatttttgtaatggagtctcgctctgtttcccaggctggagtacagtggcgcgatctcagctcactgcaacctccacctcctgggttcaagcgattctcctgcctcagcctcctgagcagctggaattaaggtatgtgccaccatgcccagctaattttgtatttttagtagagatggggtttctccatgttggtcaggctggtctcgaactcccaacctcaggcaatctgcccgccttggcctcccaaagtgttgggattacaggcgtgagccactgcacccagtgcctagctaatttttgcttttttttttttttattagagatggggtttcacta[136 bp omitted]accactgtactccagtctgggcatcagagtgagaccttatcgcaaaaaaaagttggggggaccctgtctctaaatctagtcacggtggtactgaaggttgagactttaacatatgaattttgggagacatgattcagcccacatctgca[132 bp omitted]ctgcagtctctgcctcctgggttcaagcgattctcctgcctcagccacctgagtagctgggactacaggcacctgccaccacgcctggctaatttttgtatttttagtggagatggggttttgccgtgttggccaggctggtctctaactcctgacctcaggtgatccacccgcctcagcctcctaaagtcctgggattataggcgtgagccaccacgcttggcccattttaaccatttttaagtatgtagtcctgtggcattaagtacatctccactgttgtgcccccatcaccattatccatcccgagaatttactcttcccaaactgaaattccatacccatcagacacaagcttcccatttcttcctccttgcaacacctggcagccacttttctatttcctgtctctctttcactactctagttagctcctgtatgtggaatcagacagcatttgtccttctgtgactgcctggtggtgacccttttacctgtgggttcacatgctattcctgggcagtgggaccccagggcctgttttttcaaagcccagcttctgtttgaggccctggggagatgctgggtggtggcgggggaatatgcttggcactgggttctatccttcctgcctagacctagtgacagtcaccttctttgctctgagcctttgtttactcctctgcaaaatagatattccttttattttttttttgctttttggagatgtattttagcaaaataagagaccacaccatgcagttaggcaatcagcttccctacttatgagatagaaggaattgcacagcagagatgtttacaacaatcatcccgccaggtgcggtggctcacgcctgcaatcccagcactttgggagaccgaggcaggcagatcatgaggtcaagagatcgagaccatcctggccaatatggtgaaaccccatctctactaaaaatacaaaaattagctgggtgtggtggcacaagcctgtagtcccagctactcgggaggctgaggcaggagaatcacttgaacctgggaggtagaggttgcagtgagccaagatcgtgccactgcactcaagcctggcgacagagcaagact[187 bp omitted]ggtggcgggcgcctgtagtcccagctactcaggaggctgaggcaagagaatggtgtgaacccaggaggcggagcttacagtgagcccaggtggtgccactgcactccagcctaggcgacagcgagactccgtctcaaaaaataaaacaaaaataaaaaaataaaacaatcattcctttggctagaatgtcttcacatggccatggccagctgcacgggaggctgggaaatgtggtctttaatctgggaaactgagcaccctgctggaaagcagggctcctattactgaggaagaagaggagagtggttatggggggcagctacttatctcttccataaaatcttattactggtttcccttagcttataaattatgagtgtttattttacaaaattaagtagttcaaacaat[144 bp omitted]aaactgcatctctactaaaaatataaaaaattagccgggcatggtggcaggcgcctatagtcccagctactcgggaggctgaggcaggaggatggcgtgaacctaggaggcggagcttgcagtgtgccaagatgccgccactgcactccagcctgggtgacagagcgagacacagtctcaaaaataaaaaagtgtaatgtgttggtggccatcccataggcacacatttttgtaattggccctaaatgggattatatatagatgctcacagatagagttgtttaaaatagagaaaagttaggaggcggggggcaggtagtgtcagatagcgtgtaagagcacagccctgctgacatctcagccctgccacctctgagctctgtggcctggtcaggttatcacccttcttgagcctcattttccacctcacagacagggaatcttgacaattagctcagggtgcatcagaaggattccaagagaattcatgtcaactgaggggtgcaggagctggcacgcacacagacaatgttggccatgattccttttgttgttcaacgtggaaaaaaaaaaagcctgagcaacacagtaagacc[132 bp omitted]gcctcccgagtagctgggactacaggcgcccgccacagcgcccggctaattttttgtatttttagtagagacagggtttcatcgtg[137 bp omitted]atggcgcacacctgtagtgccagctattagggaggccgaagagggaggatcgcttgagcccaggaggtcaaggctgcaatgggccgtgatgatactactgcactccagcctaggcaacagagtgagactgtatctcaaacaaacaaaaaccttag[134 bp omitted]aacatggagaaacccatctctgcaaaaaatacaaaattagccgggcatggcggcttatgcctgtaatcccagctattcaggaggctgaggcaggagaatcgcttgaacccgggaggcggaggttgcagtgagccgagatcatgccattttactccagcctgggcaacaagagtgaaactctgtcccaaaaaaaaaaaaaaacaactcatgatccctgatgtagtcactgatcacattctagactagagcagaactgcctgcctggtgtcctccaagagtgtcacacaggacactgagaaactgcaggaaagaaacctccccactctgttaagttgcaaaactgacatgtgtgcctcaaaaattcctgccatgtgccctacgcttctcagtcatgcgcccctgtcccttaccgtctccacttcacctcccctccccatggccacgtaaagacttcagattttcttatatatcaccttcttttttttcatgctgcaagcagctctgcatgaaaattatttttatctttcccttcatttttacataagaggtagcctgttttacacactgttctgctccttgatttttttcattaacaatatatctttgaaatctttccacgtcagtgcatagggagcttccttcagagagacatttttaatacaagtcacactgtaggctaatttcctttcttagaactaggcagcatcaaacatcagttcgggtgggtgctcggagaccatcttggctgcagttcttaaaatgggatccagggtttgttttcaggggcccatgaactccttgtagcttgaagctgattatgtgggaatagcctttctagatagcgggtggcgtctgtgtttttgagcacatgtggttacctggagtgggaggtggagcaggaactgggtatataaaggaatggggtgggagggagagttttgattatacgtcttttcatatatttaaaaatgttctgaacctgtgactgtagaatacctatttgggtgggagaaaggatttaatgtctgttttctttgcttactcaagtacatcaggaagcattagaaaggtccagtctcctgcaggcctgggtgcatggatgaggggccatggccatgagccctctgagagggtccacagaactgtgggcgtgtggatacacacaggacgttcttcaggggactggggatctggaatccaaaaaggcctggccttgttttatacatggggatctagaagcccagaggggttaggacccccacagccacacactaagccaggggcagagctgcctgggggcatcactgcttctacactctcccctggtgtgtttactaaaatgagagcctctgctggaggcatcggtatccccagagattgccaggtccagaccttccccagacgtgcatatcagggacttcatggggaggtagcgatggctcagctggaccgtggcccctaagaccctggaccccagggccttgtggcttctacaggcagaggcaagttcctgtgcctgatcctgcccctgatcagggctcagcagggaggcaccccacccacactagaatttactcatagtgtttttctgctccaaagttttttgtatgcctttttcctatgattaaaataacagtaatagctaacacttctcagtcacttactgggtatgcaccaggctccattctgaggtacgtgtgcgtgtgtcagatgtatatacacgctatataaacatatatataatttaatgtgtttaatgcttataaactaccctatgagagtaggcactgttattatccccatttcaaccattgaagttgaccactgaggtcacagtaagtagcagagctgggcttcagatgaagatactgtagtttagaggctgggctcataacctcttctgctgtatggttatcatacctataattaataagtacttgaatcatttaatcacatggctgcatgcagctgagaaacctccattaacacagtacaggttcatttctctctgatataccagtctggatggaggcagactaggattctgcagtcttcagtgacccagactccttgctgtttgttgtgccattgctaggtttttccctttatcctcatagcccaagacagctgctgaagattcagccatcacatccacactccaggcaacaggagagaagaataaatcaagaaggaatatttcttctctttaaggacacttttttttttttttttttgagatggagtcttactctgtcacccagactggagtccagtggcatgatctcggctcactgcgacctccacctcccaggttcaagcgattcttttgcctccgcctaccaagtagctgggattacaggcgcccgccaccacgcccggctaatttttgtatttttagtagagatggggtttcaccatgttggccaggttggtctcgaactcctgacctcaagtgttggcttcccaaagtgctgggattataggtgtaagccaccacgcccagcctcgttttggttttggtatctgttgttgctgctgattctcgctcataatgtcgtttccttttgtgcctggcttatctctgtctgtgtcctagtcattatacttgaaaagttatttgtaggaatttcagggctaggatgagcatattttcctacagagaggattgcctttgcttctgcctgggggcattaccaagtcctaggtttccttgcaccaggttcagggcttgagctgcccttcgtgactccttatcccacgagtggccttgcatacttcgccctgcatacctgttgtgcaactcctgggaatgggtaggccacctggttccttccttctcaggggtggaggcttgcaccttgtggggtcttagtttcctatagggtaggtctctggttacctcatatgttgtatgtgccctgggctagcatttttttttttttttttgagacagggtctcactctgttgcccaggctggagtgcagtggcatgatcgtggttcactgcagcctcgacctcctgggctcaggtgattctcccacctcagcctcctgagtagctgggaatataggcatggtgcgtgctgccatgcctggctaatttttgtattttttgtagaaactgtgtgttgcccaggctggtctcaaactcctgggctcaagcaatccacctacctcagcctcccagcgtgctggggttacaggtgtgagccaccgcgcccagcctaggccagcatttttgtcacccaccaaaacacctagcagatgtcctcggacacatgaagaagcttatagggctcctttacttattctttttttttttttcccctagacctgcaaatccaagatcctttacttctttttttttttttccttgagatggactttttgctcttgttgcccaggctggagtgccatggcacgatctcggttcactgcaacctccttctcctgggttcaagcgattctcctgccccagcttcccgaatagctgggattacaggcatgcaccaccactcctggctaatttttgtatttttagtagagatggggtttca[132 bp omitted]cccttcagtttttgcctgaaggtttggtaacctacagtcgtgtccattcttcagagctgtctatttatatatattcatatgtaaacttgataaaaattacatgcatgagaacaaatacgagaatacgtgagcagcatatattctcattctatcaatatgtataattacaaatataaaatatattgatattttcttagtgtattaattttatcaagcttttccaattttttccagtgagagggttggtctgaataattaagcccactgttactaaaattggaactaacgtatcacttactatctgcttctccaaaaattctccaaaagttcagaaatgttgctctttctaagcttctgtgccttcggttcttttccttttcttttttaaaaaatttaattaattaattgattaatttttttgggacaagctctctatctcccaggctggagtgcagtggcgcaatcacgtctcactgcagccttgaccgtcagggctcaagtgactctctcacctcagtcccccaagtagctgggactacaggcatgggccaccatgcccagctaatttttatattttttgtagagacgggatttcatcatgttgcccaggctggtctcaaacttttgagctcaagcaatccgcctgcctcagcttcccaaagtgctgggattacaagcatgagctgctacacctgacccaattatacttttttttttttttttttttttgagatggagtctcactctgttgcaaggctggagggcagtggcgcaatctcggctcactgcaacctacgcctcccgggttcaagtgattctcctgcctcagcctcccaagtagatgggactagaggcacgcaccaccaggcccagttaatttttgtatttttagtagagacagggtttcaccatgttggccacgatgatctcgatttcttgacctcgtgatttgcccacttcagcctcccaaagttacaggcatgagccactgtgcctggcctctatacttcttaagttattttaaaatgtgtaattaaattactattgactagagttgccgtgttttgctaccaaatactagatctcattcattctttttttttttgagatggagtctcgctctgttgcccaggctggagtgcagtggcgcgatcttggctcactgcaacctctgcctcctgggttcacaccattctcctgcctcagcctccggagtagctgggactacaggcgcccgccaccatgcccagctaatttttttgtattttttagtagagacagggtttcaccatgttagccaggatggtctcaatctcctgacctcgtgatccgcccgccttggcctcccaaagtgctgggattacaggcatgagccgccgcgcccgtcctcgttcattctattttttgtagccattaaccatccccggttctgtgcttttgaagcgctaggattccagattctttcttttaaaaattttatgtttattattttttctttatttcttttttcttttaattcatccatctgcacactgaaggggttccagattcttagtctcctctcgggggatcccagggggctggatggcaggtttcccagtctgagtcaagagtcagcccctgcagccctgtggtcaccaggagctcctgcaggatttagagtcaagggtctgcatgcagaccagggcagtgccagctacccccacacactggcaaacggtggcatctgggctccctccccagatgtggtctttagggacatcttatctccttgccagccctgtgactaccttctcagggcctccctgacttggtcactagccccaggtcaggcgccagcatgtgctaagtcagaaggaagtcaggcgggtctatggcggagagccaaggcttggggactcaccaccttgctgcttctctcctcaggatcttcatcatctgggccatcagcagttggttccgccgagggccggcccctcaggaccaggcgggccccggaggagctccacgcgtcgccagccgcaacctgttccccaaagacactttaatggtaactgccgggtggtagggcagacttgggaggtgatggggtgtggaggggtggaatgtggaggagtgatgtcagcagtcgggacagaccaggtccttgctcactggcaggtctaggaaaacaggtccagggttgaggaactctgggcccatccccaacacgtgagacctctgtcacctgggtccatccccagcacataaaacctgtgtcacccaaaagaaaaagcaaattcatttggttaaaataggttaaatcagggtctttggatgttatatttcaaaagtatgttcagcctttcagggttgcagagggagatgtgcaagggagagagtgtgagaggtggggagggcagggagccagcagaggctgacaggaggtgggcccggaaggagaggagacctgcacttccacagtgggcttgggcacaggcagggcagggcttcaggagcctccagagcaaaagcatttagatctgtcagtctaggcttttctgagcaaacatggccattggggcttgagaaaggaggaagttcttgttgggtcacagtgggttttttttttttttttttttgagatggagtctcactctgtcgcccaggctagagtgcagtggcataatcttagctcactgcaacctctgcctcccgggctccagtgatcctcctgcctcagcctcacgactagctgggattacaggcatgtgccaccacgtccagctaattttttgtatttttagtagagatggggttttacctttttggtacgctggtctcgaactcctgacctcaagtggtctacccgccttggcctcccaacgtgctgggatcacaggcatgagccaccgtgcccggtggctcacagtgcttttgtagctctggactgcttcgtccataagcctgcagagctctgaccaggaaggcccagcagccatgagggcaggagatcattcagggagctcctgccccttcctacccctaaattctaattggcaggctggccagtctccaagtgttctttgttcgttgacttcacaggctcagaccaggacaaacatggtggtatgagaaaagagaaaatatgtcctctctgctgctcttcctctctcctctcccctgtcctccataattactgttcccctgagtgtgctgaccgctgccatagctctttagccagcctgcagaggctctgaagagcaggcctgagctctgttcccttcctgtcccaacagaacctgcatgtgtacatctcagagcacgagcactttacagacttcaacgccacgtcggcactcttctgggaacagcacgatcttgtgtatggcgactggactagcggcgagaactcagacggctgctacgagcactttgctgagctcgatatcccacaggtgggggcagctctcggtttctggccccatggctgcttgactggcactgaaggaccttttcctccagtccgctccttgctgagagcatgtggagtttgggctccaggcttggcccttccctgggctcacatggtctgtgaccacaagccagtccctgagatctctgggcttcactttcccctacctgaaaaaggtagataggggtggaattggcctgggaccctcccagctacctctaaggttgtgcagtcctccactttaaactggtgaaagattagtaattgtccttggggatgtttgcctatcaccagtttatcaggcagccccgtttcaaaataatattagttaatgttgattgagctaagtgcagggtactaagctaggctgactcatggaaatttcccggcaaccctgtgaagcaggaactgttattattctcatttaacatgtgaggaaactgagagagaaggaaagtgatttacccaaggccacatcgcatgagagattcagactcaggctctacggctgtggactctcgcagccctaggctcaaatccaacctcctccaggaagccctccctgactcacagagcactcaggcttggttaagcaccctctctgggttctcacacctgctgggcttccccatcccagcccattctggggcctcattgggactcctgtatgggactgtgagccttgtgataataaggctggggctgcctagatcacttccatgtccccagcactgcccaacgtggggctgggtgcagaatcagcaagtattgaacaagtaaaagggacatctctctttggggccttcttcggctgagtccaagacagctgccctcattcctttctccccagcaggccttctcagctttggggtggagggcacatttctgttctatttctgtctgggtagctagaagcagaatgtggacacagtcattctggtttttttttttgttttttgtttttttttgagacagcgtctcgctctgtcacccagtctggagggcagtggcgcaaccttggctcactgcaacttcacctcccaggttcaagcgattctcatgtgccagcctcctgagtagctgggactaaggcacacatgatcacacccagctaatttttttattttttagtagagacaaggtttcactatgttggccaggttggccttgaactcctgacctcaagtgatccacctaccttggtctcccaaagtgctgggattacaggcgtgagacaccgcgtccagccatcattcttttctttttgagatggggtcttgctctgttgcctaggctgaagtgcagtggtgcaattacagctcactgcagcctcaacctcctgggctcaagcaatcttttcacctcagcctcccaagtagctgggacaacaggcatgcaccaccatgcccagctaattttttgtagagatggggtctcaacatgtttcccaggctggtctcaaactcctctgctcaagcgatcctctcacctcagcctctcaaagtgctggaattacaggcatgaaccaccccacctggctggactttctgacctgcactgagaggtgactcccacagagacctcaagcccagcccccaggccttgccacgagatccaaggaaggaccagggcctggcaggcccagcagggggatctgcttccaagggcttggatctaagtcgaagcttcagggtggggtccaagtggacttaaaaggcaggagagctgggcacagtggcatgtgcctgtaggcacagctactcaggaggctgaggtgggagaatggccagagcccaggagtttaagactgtagtgtgccatgatcgcaactgcaaatagccagtgcactccagcctgggcaacacaggaagaccccatctctaaaaaagatagggagagtgaggagaacacaatgtggccaactgaattcgagctctgcacaaggatcagagaggttcagtgctcgcctttgtctccacccagtgcccctggacaacttgcctcccttcttgaagcctcagtttcctcatctggatcaagtgagaatagtcccccttccctgggaggcaaggagacttgatgagataatgaggaagacttgggcagagaggggccagctggaggtagcagggagtagcacccaggagcccacagactgggtttccatctgcgtacttgccacacactatgtgaccccttggcatgagccccgtttgcctcatctgcaaaatggggtggtaacatgacccattgcataaggttgacatgttatatgtgtgttaactcgttagattaggaagctgttgtctgaagtgcccagggcagggtctggcccatagtaggagctccatgtcggtcagctgcttcttcctgttgagtgagcttaacgagagctcgttgactgagctgtgtgccagtgctccaggtagtccctgcagtggtgccctcgggtcagtgctgtgggaacttcgcatcctctaggtggggccctgaggctcagagagaagctgagctcacacggccatggcaggtagagcgggcgtctgagtctgtctgactccagcatttacctctctgccacccagctacatgccccaccctgagtactcagtaaatggccagagagttgagggggaggaaactgctgcagatgggtgccaggcagggctttaacgtttccctcaccccagttgcccagcctgcccacctgaccttccgtcttttgcagagcgtccagcagaacggctccatctacatccacgtttacttcaccaagagtggcttccacccagacccccggcagaaggccctgtaccgccggcttgccacagtccacatgtcccggagtaagtcgctcccctgcagccaggacccactgtccaggaggccagcatcctgggagcccccaggctaatgtggcggacaaatcccaagtccaggagggcaggcaggaagcctgtgctcaaagagggtgggattggcagggcaggctcaagccccacccagcctgaaagagccctgtggacactaagcagggatacccacggaggaagggagacccacggaggctcagggaccagagagaaattggccagaaaaagcagctggagacagggactcttggagaggaggagacgtccttcaccaagggggaagggccagggttgacttttgcacagtaggggcctgatagaagtagacactcaaaaataatttgtgggctgggtgcagtggttcatgcctgtaatcctagcactttgggagacaaggtgggcagattgcttgagcccaggagtttgagaccagcctgggaaacatgacaaaaccctgtctctaccaaaaaagacacaaaaactagctgggcgtgtgcctgtagtcccagctgctcaggaggctgaggtgggaggatcgcttgagcccaggaggtggaggttgcagtgagccagaatcacaccactgcactccagcctgggtgacagaccgagaacctgtctcaaaaagatagatagaggccgggcacagtggctcacgcctgtaatcccaggactttgggaggcc[133 bp omitted]gaggcaggagaatcgcttgaatccaggaggcggaggttgcattgagctgagatcacgccattgcactccagcctggtgacacagcaagactccgtctccgtctcaaaaaaaaaaaaaatagataaaattcaaagaacagtgtgggcaacataatgagacttcgttgctacaaaaattaatagccaggtatggtggtgagcacctgtggttccagctacatgggaggctgaggtgggaggatcgcttgaacctgggaggtcaaggatgcagtgagctgtgattgcactacagctttccagcctgggcgacagagcaagtccacgtctctgaaaaaacaatagtaataaaaaataagactaccacttctactcccatgataactcattaatccattaaaccactaatccatgaatgggttaatcagttcctgaggggagggtcctcatgacccagtcacctcttaaaagcctcatctctcagtactggcacattggggattaagtttcactgggagtggggagtactagagtacatcagtagtcccagctacttgggaggctgaggtgggagaatcagcatgagttttggccaggacaaacattcaaaccatagcattgtccgtcctcttgttttcgagaagttaataattgttgtcatctttctgcttgcctggctctttttttttttttttttgagacagggtctcactatgtcgcccaggctggagtgcagtggactatctcagctcaccacaatttccacctcccaagttcaagcgattctcccaccttagcctccaaaatagctgggactacaggcacacgccactacgcccggctagtttttgtatttttagtagagacggggttt[132 bp omitted]gagtcctctgtctcctgatgggcagccgtagaaatctcttgctgtacctgtttgagcggagctggagaatggcttcctcagaaagccccccattcttctaacgggagttctgtgtactccacctagctttcactttattgaggactattccagacattccctgtggatttggttaagatccatctggctggttttgggtggcgcagcaacagacagaattctatttgtatgagttaggtcttacctacttcttttagtacaaaaatatcctaaaggatggtaatttttttttatcacctatactggatgaaatgaaaagttgactctatgtgggtccctagaaatgacttggaaaggtcttctggagttacttgagcccctttctgagtgagtgtgtctgaagaatgtgctgcgttggtatgtcccacccggctgacgtccatgtggtgagatctttggagaaccaggcagaagtggcttgagggggtgtgacctacagggttggtctcacagatgtttccctgcagggggatacgtcaggggtctgggctaaaatgcccgatgtttcagaggtcgctctgaaggtgacccaggtgggtggctcttcaccctattcttgtaccccgtttgacgatcacctaatcatcccgttgacccaaatcgatgccagtattttctgcagttttgtctttggtgagtgtgatccatgtcactgtgtggtgaggtttattcacagtcagtctggtctgtaaaatagaacctgcagacagtgaacctgaaaagcatactaggatcatccaggcctccctccccagccttggagctgggaccctcaaagcagggacatagaaggacttggagtgagccacccacaaactccagggtgaaggagagtgtgagttcagaaaagcccccttttggctggttgtggtggctcatgcctggaaacccagcactttgggaagccaaggcaagcagatcacttgaggtcaggacttcgagaccagcctggccaacatggtgaaaccctgtctctactaaaaatacaaaacttagctgggcatggtggcacatgcctgtaatcccagttactcgggaagctgaggtgggagaatcttttggaccccggaggcggagattgcagtgagccgagatcgtgccactgtactctagcctgggcgacagagcaagactccatctcaaaaaaaaaaaaaaaaaaagaaaagaaaagccccttttatccccaagaggccaataatcagtattctagagcagctccgtcccatggagataggatgtgagccagagaaggcattaaaatttttccaatagaaaaatactaaagagtaaaaaggtaaagagaggccaggcacggtggctcatgcctgtagtcccagcactttgggaggccaaagtcagaggatcgcttgagcccaggagtttgaggccagccctggcaacatagggagacctcatctctacaaaaaaaaattttattttattttatttattttatttcattttatttatttattattatttttttttg[135 bp omitted]cacgcccggctaatggtttttttgtatttttagtagagaccaggtttcaccgtgttagccaggatggtcttgatctcctgacctcgtgatccacccgccttggcctcccaaagcactgggattacaggcatgagccagcgcgcctggcctattttattttatttttttttgagacagagtttcactcttgttgcccaggctggagtacagtggcatgatcttggctcgccacagcctccacctcccaggttcaagcaattctgcctcagcctcccaagtagctgggattacagtcatgtgtcaccacgcccagctaattttgtatttatagtagagatagggtttctccatgttggtcaggctggtctcgaactcccgacctcaggggacccacctgccttggcctcccaaagtgttgggattacaggcgtgagccaaaaaatttttttaaattagccagatatggtggtgcgcaacctgtagtgtcctccgactcaggaggctcaggtagaaggatcatttgagtccaggaggtcaaggctgcagtgaactgtgatcaggccactgcacttcagcctgagcaacaaagcgagaccctgtctcaaaaagaaatataaataaaataataaaaaggtaaggccagggccgtgatggctcacacctgtaatcccagcactttgggaggccaaggctagaggattgcttgagcctaggagttcgagaccagcctgggcaacatggcaaaaccccccctaataaaaatacaaaaattagccaggcatggtggcacatgcctgtaatcccagctactcgggagcctgaggtaggaggatcacccaagcccaggaggttgaggctgcagtgatcacaccactgcactctagcctggataacaaaaggagaccctgtctcacaaataaataaataaaaaggtaaagaaaaaccatgagattaatatcaataatagtttaattgagctcaacatattctcgtttcaacatatgatcagtataaaaagtgagatattttacatttttgtttccccttgtgtcagttttcagaatctagtgtgtgtgactgggcacggtggctcacatctgtaatcccagcactttgggaggttgaggcaggtggatcacttgaggccaggagtttgagaccagcctggccaacataatgaaaccccagctatactaaaaatacaaaaattaggcgggcatggtggctaacgcttgtaattccgtctactcgggaggctgaggcaggagaatcacttgaacccagaaggcagaggttgcagtgagctgaaatcgtgccactgcactctagtctgggcgacagagcgagactatgtcaaaaaaaaaaaaaagggtctagcgtgtgttttatatcatagcacttcttggtttggaccagccatatttgcagtgcccagtagctgcatgtggccagcaaccctgatactggatggtgcagctctagaagattttcctccaagaaaggggggctttttcctccccacaggagccaggtccatctggtctggatgcctccaagctgcagaatgtgttctttgcctgagccaaagcctctctcccctgtgcctccccctccaccagccagcgctgccctctggggctctcccttccctggacagtctctgtcaggtgtggacacgattggggcatgtccccctggaattttctccaagtcaacccttgagtgttggtttctccccctggacacaggaggaagatccccaatgatttaataatcatagaaatgatgaggattggccaggtggctcaagcctgtagtcccagcaatttgagaggccgaggcaggtggatcacttgaggttagaatttgagaccagcctggccaacatggttaaactccg[132 bp omitted]gctctctagcctgggcaacagagtgagactccatctcaaaaaaaaaaaaaaaatgaggatgacgtttctgctaataagcagtaggccctgggccaagaagtggtgaggcttttcttccttctttagggaagtgacatcactcaccagcatcccttagcttgtaggattcagagccaagattgcccccagagcccccgctgttggccaggtctctttcccctttccctgtctctccctggccccaggggacaggatagagacttgagggagggcagactgagttttccttcatagcataaggaagagctgaaaagtccccgggctcagtggctcacgcctgtcatcccagcactttgggagactgaggtgggcagatcacgaggccaggagattgagaccagcctgggcaacatggtgacaccctgtctctactaaaaatacaaaattagccgggcgtggtggtacacgcctgtagtcccagctacccaggaggctgaggtgggagaatagctggaacctggga[146 bp omitted]cagctcacacctgtaatcccagcactttgggaggccaaggtgggcagatcacgagatcaggagattgagacaatcctggctaacacagtgaaaccctgtctttactaaaaatacaaaaaattagcagagcctggtggcacacgcctgtaatcccagctacttgagaggctgaggcaggagaattgcttgaacccaggaggcggaggttgcagtgagccgagattgtgccactgcactccagcctgggtgacagagcgagactctgtctccagaaaaaaaacagaaacgtccccaggccagggcagaggttgggagatggagcgtgggcacgcacaagccccttcctccccggcagcatttgggacaacatggcagggggcctgtggccaactgggcctctgcgagaggaagtgaggccaactcctggctggggattcacagcctcaaagtgtttctcatcttggtttctcatgttggtggcttcaggccttttttggaaccgtctgctgcctctttatagtcatgtattcaactggtcatcaccgagcctgtgcaggcgccccatgtgtattcaaacaggccctgcccctacccgcatttccgcacagagtttgcagactggttgcagggacagacagcaggcaggtaaaccactggctaagtggttttggatagtggtgaaatgttgtgaaggaaacaagctggcaggagaatgactgcataggctcattcagtggggtggccagggaagccctgtggaagaaggacattctgccagggacttgaatgccacggaggagccaggccacgaagattgtgtcagggcatgggttcctgggacacggggcagcacgcctgaaggccccgggttggcatgtttgagaagtggaaggtggtgagggttgagaggtcaccggggctacggtgagtgtctggggttccaaagctgcgggatgccatgatcagtcacttgtttttatttatttgtttgtttgttttctttttctttttgaaacggagtttcgctcttgttgcccaggctggagtgcaacagtgcgatctcagcttcctgtaacctccacctccctagttcaagcgattctcctgcctcagccttccgagtagctgggattacaggcacccgccaccacatccggctgatttttgtatttttattagagacggggggtttcaccatgctggccaggctggtctctaactcctgacctcaggggatctgcccgccccagcctcccaaagtgctgggattacagtgccctactgagctggggtttctgcctggggcatttggtgatggtggcgtccccatgatcatgaggaactgggattcgttgagatttggggaggcagttctggcattccaggtcacattgatctcagcaggtgagtgcaaggtggatgccaggagaccgtgagccgttgctggtgggcaggggtccgggctctggaggctgcaggtgccagcaggtctcacgtcccctcctttcccacctcccaaccacagtgatcaacaaatacaagcgcagacgatttcagaaaaccaagaacctgctgacaggagagacagaagcggacccagaaatgatcaaggtaaatgggcagggttgtcagggcctatagggaccaagccaggccattcacagctcatcccagaccactggggctgtcatctgtcaccaccactgaaccaccatgccggctcggtcatgccacctcccctccctgagcactgggctcctcctctgggaaatggggtcaggaggcagctgtctctcagggagtgaggaggatcccagacaaggttacctgagcctcttgccagcctgggaggggtctacatcacagtcccattgtcacatgaggacacttgctcagtctcagccggaagtggcaggccagggactctcacccacacagccaggccccagagcccaagctcagcctggctccaagcacacacacgagaatatggctttagtaggaactgcaggattcatagttgctgtcactcccagtgggctggggagccgggcagttaatctgtggttaacctgcagtgggcactaagagacttcctctctctgcgggtggtcctgtgttgggggggtggtccctgctcatggagctgaggccaccgtgcaagagtgtgtggagcctgctgtcatgaggctgggcttcgcagcctggcctaggatgccagccctgcctctacctctacctcggttttctacatgtggggtgggaggatcctgtcggtggccggaagggtcctgggtggcggaatctctaagcctagggaggagagccttctgccagcagttgctgtggtggctgatattctgctgccagggttgtcaggggagatggctcatgcctgttttcccagcattttgggaggccgaagcagaaggatcacttgagcccggaagttcaagatcagcccaggcagcatagtgagaccccatctcttccaaaaaagagaaaaaagaaagaaagaaaagaagctgtccatggtggctcacgcctctaatcccagcactttgggaggccgaggtgggaggatcgtgcttgagcccagaattcgagaccagcttgggcagcatagtgagaccccatctcagaaaaaaaagaaagcaaagattaagattttctcgggaaccctggggaggaagtgtacagagagtgatagtccccgagcacttccacctgcctctgaggtccttccccccatgttgcctcagagggctgaggactatgggcctgtggaggtgatctcccattggcaccccaacatcaccatcaacatcgtggacgaccacacgccgtgggtgaagggcagtgtgccccctcccctggatcaatgtaagctccccagccctgccagctgcctgcagagcctttgagagggtgctcggggtccatctccttgtcttctcctggccctgtccccctgagagagctttccagggctccaccctcccaagctcccaccctgtcctatccccttcccatgtcctctccctctcccacaccaccacccctggggaccccaggactgacttctacacgccagcatcggtccgcaatcaagtgccatccagcccacaaactgttttcaaaaaatgtcttatcacttgccagcttttgaaattgaggcagtatcacttaaaagccacaatttctggcttattttataaaactgggttacatggtcacccacagggcagccgtgggctggagctgagccacagctgcccccttcagtggggacctgcctgccctttgcctcagtcccctctgctgaggtcaaggcaccctttagctcctcatggtgtggcctagaaatgtcccctgtcctccagtctctgtagaggggccctgttgggtctctccagacatctgaggcctgcgggtaccctggcctcctgcccgggccaaatggtgcccctgccccacgtgctgcagatgtgaagttcgacgccgtgagcggtgactactatcccatcatctacttcaatgactactggaacctgcagaaggactactaccccatcaacgagagcctggccagcctgccgctccgcgtctccttctgcccactctcgctttggcgctggcagctctatgctgcccagagcaccaagtcgccctggaacttcctgggtgatgagttgtacgagcagtcagatgaggagcaggactcggtgaaggtgagtgcggccggtgtgggcgggacttcccggtgccttcctgggcgcaagaggccaagaggaagtgtgccaggcctgggctgtgggacctcccgcctggtgctcctctgcccacagtttcacaacctcccaggtcccttctccacagtgaaaggaagtgggcacccagccctccagccctagatgactgggggtcctctccccaggctgttctgttggaccctttgggtccagacctgtcccttcctccttctgtcccagaccttgtgtccctggccctggctccaactctgtgtctctgccatctcactgggtcctgaaatgtcagcctgtgtctgtggcgtgaggctcggctttgcctcctgggctgtcgtcactgttgggtctctgctcctggctcccagtgtcccttcacccactccccgcagcactcccttggcctctgcctcttcccctagtgccatctccccgtctcttctgtctttgtgagtcaccctcctctctctccccatctgcccatctctgacccagtctcctcctggctggcccaccttcagcctccctctacaggcggccccaggggcagccctcgggacaaaagctagtgaaggtgctcctgggtggggacaggctgtgctcacatgtgtcccctgcaggtggccctgctggagaccaacccctacctgctggcgctcaccatcatcgtgtctatcgttcacagtgtcttcgagttcctggccttcaagaatggtaggaacaggaccccagggctagtgagaggctgtgcagggtgggggacaggacctgcccccttcctcctcccctccctccccacatgtcctccccctgcctggggtctctcagccccactctccagaggcctagtgagctggggaggggcagtggccccaaaactcccaacccagaaattcccacccaccgggtgtggagctgagggaggggctggcccgctggtggggcagaggccaggccaatactgccaggaagcagggctggggaactccagagccaagagcagggaagccccggagctgctcccgccaccctgcccggcaggctgcctgctgcgggaggccgcttagggctgagtggacggggcctgcccaagtgggaaggaggagcactgtcccccaaaggtccctaggttctaaggctgaccatactgatggccagcgtttgaggagaagcagccacatgccaggcactgtcctgggtaccctccccagtagctccttgagccctgtgggagccagaggctcagggatgtcacttgcccagtcacacggttcctaaggggcagatggttccagccccaactctcatcttctaggccctgcaggccacttcttccttgcccagagcaccccagtctgaaggagtggcctgcggccctgtagctcccgcaggcggcaagaggaatgagtagtagtattcctggtattaagatgctattgccggcctggtggtggctctcgcctgtaatcccagcactttgggaggccaaggtgggaggatcacctaagccccggagtttgagaccagcctgggcaacaaagcgagattcgtttctacacaattttttttaagaattagctgggcatggcagcgtgtgcctatggtctcagctactcgggaggcttgggcctgaaaggtcaaggctgccgtgagccatgatcacaccactgaactccatcctaggcaacagagtgacaccctgttccaaaaaaaaggacgctcttgccattattgagaactaccatctggaagaatgcagtgtcatacgggcacaggagctggtgccgaccccagccagccatctaccagctgtcgctgggagacgggacccttctgcctaggagctggcttggctggggtccagtgagaaatgaggcacaagaaggctgtcctccccagtgtcatgcagcagggggcgcaggcctcacttggcaccagtgctgtgtggcctccctggtctaaggagaggcttgggcccaactgctcccacgagaacccaccagaaccctgtctccagacccattcttctcagttgggacaggggtcattctgatgggcaggggtgggtggggtgaggctatggagtgtgccagagctctgggatgtgggggagctctgggatgtgggggagctctgggatggggtagggtgcacatggaccagaattcacagccctcactccctgagtgcagagctggccctgactctgcaggactgcagacctggctccaccactgtgctacagacgtggtggctcagcctcctgtggctgcggttagatgctcagccgggcggggtcaagagaggggtgtccgtggtgagaccagggctcagagaggagcatgctgacatggatccttggcagcatctaggcggagcactggaaggagctccagactggagcccagggcccttttcagtttcctgagcatggctgtgagccagttccttcccggtgtcagggcaggggcctggaggaggtggtcttgaagtgcatgccacagatcttccttcccagggagggcgagctggcaccatggtgtggcacagaccccgcgtcccttcagattctgccatgccaggctgtttggcctcagggaagcagcttccctgaccagtccttagcacctggcacgtggtgagccctgtccatggcaccagtcaccgtcaccatcagtcaagggactgcaccttggggtgctgggtgctgacgtcctatgggagggctccaggggtgccgcctgtctggtgctctgggggtcacccaatgaatatgagagccttcctgggagagaggggtctcgttcagcacccctcctgaggacccagccccaccccagggtgtgaggatgcaggccaagggggcctgagggagctgcagtagggtctcagcacctcctcagcctcctggttcccccctaccccctgcgcacagatatccagttctggaacagccggcagtccctggagggcctgtccgtgcgctccgtcttcttcggcgttttccagtcattcgtggtcctcctctacatcctggacaacgagaccaacttcgtggtccaggtcagcgtcttcattggggtcctcatcgacctctggaagatcaccaaggtcatggacgtccgggtaaggctggggcgccatgctgtctcgggagctgcaggggttgggagggggtagtgtggcccagctggaccctggagctggcccccgggggattcccagcaagtgcctcactcccaggactgaggggattttctcaccaggggattttttgggtcacacatggggcaggggaactgggaacggtggggaagggcaggggctggttctggcttgtggggtgggagccagcgtagcaactgaccatggcacccacctcatccacagctggaccgagagcacagggtggcaggaatcttcccccgcctatccttcaaggacaagtccacgtatatcgagtcctcgaccaaagtgtatgatgatgtgagtgtcctgcacagtgggcccctgggggtggtctccaggtaccacgtatccctgaggcacccggggccggccatctgtctgccggacccatgctttacagcctgtgccacatcctctgtgtcccccatctgccataactgcttccctgggcgagtccggagtccccagggctacctggaaattccccctgcccggcctgccagaccaggtgtggtgggtgagggcggggagcagggctgccaggcagggctgaggagctggctgacagccccaccctgtggccccacagatggcattccggtacctgtcctggatcctcttcccgctcctgggctgctatgccgtctacagtcttctgtacctggagcacaagggctggtactcctgggtgctcagcatgctctacggcttcctgctgaccttcggtgagcggtccggccgccccaggagagagcaggccccatgctgcgcagggctcacagccccagtgtaggagacagacccatccccagacagggacaacctagggtgggcagagctgggatatagggaggcccgagggcacacatggccccatctggggtcagagaggacttcagggaggacatgaacagtacgcttcagtcctcattctcagggggcctttgtgtcttgggaacaagtaaacaagtagggccaggtgcagtggctcacacctgttatcccaatgctttgggaggctgaggcaggaggatcacttgagcccaggaattcgtgaccagcctgggcaacttggcaagacccgatctctacaaaaaaacacagaaattattggggagtggtggtgcgtgcctgtagtcccagctacctgggaggctgaggtgggaggatcccttgagtccaggaggttgaagctgcagtgagccatgattacgccactgcactccagcctgggtgacagagtgagaccctgtctcaaaaaacaaaagaccgggtgaatcacagccaatagtgagtactgtgaagggcagagtggtgggaggatgcacattaataggggtccgggggcccctctgaggacaggacatttaaacagaggcctcagatatccagggagagagctgtgcggatgtgacagaaggccccaccagtgcagaggccgctggtagagtgtgcccaggtataggaagtggtagagtgtgcccaggtgtaggaagtggtgagggggctggtatggccagtgcagagtgcacaggggagaggtgggagaggccatccctctgctcatgggtgctctcactgcaggcttcatcaccatgacgccccagctcttcatcaactacaagctcaagtctgtggcccaccttccctggcgcatgctcacctacaaggccctcaacacattcatcgacgacctgttcgcctttgtcatcaagatgcccgttatgtaccggatcggctgcctgcgggacggtgaggcccggtgggcaggtgggagctcccaccggaacagggccctgaggcagtctttagggcccaggcctgagggggtgccacggccccagatggggtgctcagtctgagggggctcggccccgcccttgcatcacgccctctccacccaggcccacctggctgtggacgggccagcccgacctcacactgcctcccacccctctccagatgtggttttcttcatctacctctaccaacggtggatctaccgcgtcgaccccacccgagtcaacgagtttggcatgagtggagaagaccccacagctgccgcccccgtggccgaggttcccacagcagcaggggccctcacgcccacacctgcacccaccacgaccaccgccaccagggaggaggcctccacgtccctgcccaccaagcccacccagggggccagctctgccagcgagccccaggaagcccctccaaagccagcagaggacaagaaaaaggattagtcgagactggtcctcacctgctccggctcctggcgaccactacccctgcgtcccggccccctcgcctcccctccctgtcgccctttccctggacagatcaggccggggcggtgggaggcccgcctcaggtcagggcccagcgtgtgatgtaggggccggggcaggccagggtttgtttgtggaggcgctgtctgtccctctgtccctctgtgtttccagccatctcgccctgccagcccagcaccactgggaatcatggtgaagctgatgcagcgttgccgagggggtgggttgggcgggggtggggccgggcccccctacgggatgcccacggccgttcatcatcttgtccctcgtccccctaccacactccccctcctagaccgccgccctttaacacagtctggatttaataaattcatatgggtgtttaacttaaactcagcactgcccctcctcctcgtgccttccttcctctgttgccttggacaacagcttccagcagggatgaggtggctttcctgggtctgggagagtgacctgacacggtacgggacctgtaaaggtggggattgtgaccttgtgtcaagaaccatacctggccgggcgcagtggctcacacctataatcccaacactttgggaggctgaagtggatggatcacttgaggtcaggagtttgggaccagtctggccaacatagtgaaaccctgtctctactaaaaataccaaaattaattgggaatgctggcaggcacctgtaatcacagatactcgagaggctgaggcaggagaatcatttgaactcgggaggcggaggctgcagtgagcccagatcacacactgcactccagcctggacaacacagcaagattccatctcaaaaaaaaaaaaaaaagccatacccgccaggccaggcctcttcctcacttctcgccctcccaccagccctctgagatttcattaactggcctcatttcagattgctggggaagctgcttgcagggagctcgctgccctataccctttcctgccagctgcccctgctgggtgcaggctggagcctgccatgtgcccgctgaatgtctcctaacccgacaccaccaggcagggccaagtacagctttcagccgggtcgccatgagcacctgccaccctgaggcctcagcacagcagttggggcacgctaaatgtgtgccattggctttttgcgctgacacccactcccaattttggggagcatgggggtgaaggctcagcctgcctgagtggcacctggttggctggctgtagcactctgtgagtgttggggtgtcatatcacatccccggggctgcctgtgctgacaacagaggtggcatgagttggatttcccatcccagcccctggtgctgggactcttcgcccactggataggtgagctgagcgaggcctctgtgttctgagggctggggaccctacattcccaggtttactgttttggggggtggtctcagcaacacttctgggatagggggcccaacgctgaggaccacaccaggttccttcaggctccagctgccaccccatattgcagagccagtcaggggatccatgaggccccagggagacgatggcaccctcggagccccataccacaggtccacaggccatggcagtctcccatccctcagggcagccatgggtctccattacccgccccccaactctataccattccatggatccccggtgcccttggaggaaccccagcctctgcaccatggcctgactgacaggctcctaggaaccccggaggtacagggctctgcagccccttgagactggtgggctctccagccacctggacttcctggcctcgtcacccctggttcttcctcctctcacagctccacgcccaagcctttgacaaggcccatcagctacccccacaactccctgggggtctcacctcttcattgggaccacctgctccacctgctccatgcccctccttaccctgtggtgttcttgctcagtgttctgtctggtcccctgtcccggtcctgccctccccacatcccattcacactctagctagcagctagaggaaactcttttttttctttgagacagaatcttgctctgttgcccaggctgtagtgtagtggtaggatctcagctcactgcaacctctgcctcctgggttcaagtgattctcctgtctcagcctcctgagtagctaggattacagacatgcaccaccacgcttggctaattttttgtatttttaatagagacgggatttcgccatgttggccaggctggtctcgacctcaagcaatctgcccacctcagcctcccaaagtgctgggattacagacatgaaccaccctgcccggcccagctagaggaaactttatagtttattctactaaagcacaaacctgaccctgcccagcccttgctcagaacctactgtgggtgcacagtgacctcaggagaaagcccaggctccttactggggactgagaccttggtgatggggacacttattaacccctgcatccagcctggtcttccccctacctggatcctgcccccaggcacacaacccctgtccacttctttttttctttgagagagtcttgcgttgtcccccaggctggagtgcagtggcacaatcacagccctgcagccttgacctgctggctcaagcgatcctcctgcctcagcctcccaactacctaggaccacaggcaagtgccactacgcctgcgtaattatttatttatttatttagtatttttatttattattattattttttgagatggagtctcactcttgttgcccaggctggagtgcagtggcacgatcttggctcactgcaacctccacctcccgggttcaagcgattcttctgcctcagcctcctgagtagctgggattacaggcacccaccatcacacccggctaatgtttgtatttttagtagagacagggtttcaccatcttggccagtctggtctcgaactcctgacattgtgatccacctgcctcggcctcccaaagtgctgggattacaagtgtgagccacagcacctggccgcctgcgtaatttttaaattttttgtagagttggggtctctcgatgttgccaaagctggtttcaaactcctggcctcaagcagtcctcccagctgggcctcccaaagtgctgggattacaggcctgagccatcacagctggcttatcccttctttatcttacccatgtgtcctccaagctgtggctccaatgctcactcctgtaggaagccctccctgactgccaagttctctggggtctctcatggcagccctgcccactgtgagtcatcactggggacaggttggtctcttccactggatggagccccgtgaggacatagccagacctgtcttgatcactgctgtgtccccagcatagggccaaacacagagaagccacgccaggaatatttaatgagtgcatgttgaacaaccccaacattcactttcccagacacatgaacacatccagaagtgtggacctcggtggggctcatattcagacactggagactgtgacaagcagtcaacaaatgtaacagctgaaccctgcccctgggtagtgccgtgtgctggggtgttttgtgtatacagccaggaccaagacagacccagacctgccgtcatggggctcacagcccagcagaaatcctgagcactgaggatatctgacatgtcctttttaatttttatttttatttatttacttttttttttttttttgagatggagtctcgctctgttgctcaggctggagtgcagtggcacgatctcggctcactgcagccttcgcctgtcgagttcaagcaattctcctgtctcagcctcctgagtagctgggactacaggcacctgctaccaagcccagctaacttttgtatttttagtagagacagagtttcacatttcaccatattggtcaggctggtctcgaactcctgacctcaagtgatctgcctgcctcggcctcccacagtgctgagattacaggcatgagccacggcg[137 bp omitted]gcctcctgaatagctgggattacaggagtgcgccaccacgtccagctaatttttgtatttttagtagagatggtattttaccatgttgatcaggctggtctcaaactcctgacctcatgatccacccgcctcagcctcacaaagtgctgggattacagacgtgagccactgtgcctggcccctttttatttatttgtgttctttttgagatggagtcactgtcacccaggctggagtgagtgcagtggcacgatctcacttcactgcaacctccgcctcctgggttcaagtgattctcctgcctcagcctcctgaatagctgggattataggtgcccgccaccacaccagctaatttttgtatttttagtagacatggggtttcaccatgttggccaggctggtcttgaactcctgacctcaggtgatctgcctgcctcagcctcccaaagtgttgggattacaggcatgagccaccgtgcctggccctgacatgtccttttagtcattcagcaaactttttttttttttttttttttttgagacagtctcactctgtcacctaggctggagtgcagtggcgtgatctcagctcactgcagcctccacttcctgggttcaagtgatcgtcctgcctc[134 bp omitted]ggcctcccaaagtgctgggattacaggcatgagccactgcacccagcctcaacaaacatttttgaggcctggcattggcaagaggcagagaggaatcaggagagcttctggtcctataacaattggagctgctatttgtcatccttatcataagccaagcactagtgtaagtgctgcatgtggttggcttcatccattacatttaatattattcagtgtcctcgtcaccttactggtccatcactctgccctcatctctacccctttcctgtcagtcactctgcaccagccttcttgctattccttaagcatgccatgcatgttcctaccacagggcctttgcacgtgctagcccctgtgctttgaacactctcccccagatatccacatgaatccctcacctcctttgactccctgttcaaatggcacctctcagaccctgatcttcctaacccaaactatcttccgaactccttctcgttatcctgctctatcctgtaatactgccatcaccatcagacataatatttgcttatctgttttccatctgtctcctcacttggatttccttgatggcaagggctttttgtctgctgtgtgccttgctatgtccctagcttttagagcagtgcctgacactgttacgctgtgtgtaataactgtaaattgaagagccaggcacagtggctcacgcctgtaatcccagcgctttgggaggttcgggcagaaggatcacttgaggctaggaggtcaagatcagcct[138 bp omitted]ggtgaaaccctgtctctactaaaactacaaaaaattagccaggcatggtggcgggcgcctgtagtcccagctactcgggaggctgaggagcagaatggcgtgaacccgggagtaggagcttgcagtgagccgagatcgcgccactgcactccagcctgggtggcagaggaagactccatctcaacaaaaaaaaaaaaagaaagaaatagggctgggcacagtggctcacgactgtaatcccagcactttgggaggccaagacaggcggatcacctgaggtcaggagttcaagaccagcctggacaacatggtgaaaccccatctctactaaaaaaaaaaaaaaaaaaagaaagaaagaaatgtagtcccagcactttgggaggctgaggtaggcagctcgcttgaatccaggagtttgagaccagcttgggcaacatggtgaaacctcatctctgctaaaaacacaaaaattaggccaggcatggtggcgcacacctgtggtcccagctcaccagctgtgtggcctcaggcaactgacttcatctctctgagcttcagtttcccgtctgtaaagtgggtctaataataggacggtcatgagtattaaataaaatgatgttaatagttagttgccctttggccaggtgcactggctcagcctaagcaacagatcctctctctacaaaaatagaaaacaggctgggcgcagtggctcatgcctgtagtcccagctacttgggaagctgaggcaggagaatcgcttgaacccgggaggcagagattgcagtgagctgagatcgcaccactgcactgcagcctgggtgacagagcgagactccatctctcaaaaaaaaaaagaaagaaaagaaaagaaaacattagccggatgcggtggtgtgtgcctgtagtcccagctactctggaggctgaggtgagaggatccccttagtccaggaggttgaggctgtggtgaaccatgttcctgccactgcactccaacctcggtgacagagtgacaccctgcctcaaaaaaaaaaaaaaagttcacatttgtatatagcacccacatgtgccaggccctgttctaagaattttgtgttttaaatatttgtgtctattaatttgtgtgaccttggagaaattaattttgccgggtttcagttttctcatctgctatgtggggatcaataacaccatatacttcacacaattgttgtgaacattcaacttacagagttatttctttttctttttgagacaaggtctcactctgtcacccaggctggagtgcaatagcgtcatcacagctcactgcagcctcaacctcccaggctcaagcaatcctcctgcctcggcctcccaaagtattggggttacaggtgtgagccaccgtgcctagccagaacacccaaattttatacaagcaaaggaaagacaacaaaccctgcatctgtggtctgagagcgcctggcatccaacttagaacctaatagatcacctagtcgttctcaggaatatgagaggcttaggaatgtgatctagccaaatggctgcccctctttcagcctgagtcccttctgcaataatcctatcatatgcttctggcgctggtgatagggatgagctcagggtttaggcacacagctcaggatgtatacggaggctacactgctgccattcgcagactgaataactgagcttttgagctcaaagtggtctgggctatttatgggtaactttcaggggctgcagggaggaacaaaccaataaataaaacatccatgcattcatccaataaacttttttttttttgagatgggagtctcgctctgttgcccaggctggagtgcagtggcacgatctcagctcactgcaacctccgcctcccaggttcaagctattctcctgcctcagcctccggagtagctggcattacaggcgcacaccaacacgcccagctaatttttgtatttttagtagagatgggatttcaccatgtcggtcaggctggtctcgaaatcctgacctcgtgatgtgcctgcctcggcctcccaaagtgctgagattacaggcatgaaccaccgcgcccggcctccaataaacatttattgggcacctacggtgttccaggcgctggtctaggcgttggggttacaacaacgcacaaaacataaattctgaagctgacacgctagctttaaacgttccttaaatatcttcatcctcaatttacggttgaggaaactgaggtgtagcgagaccttggaggtttccgaaatattattatggatggcaggtgtagagccctgccaacctctcgatcctgaagctccccttccagcctgagaaacggcaggttcaagtcccactgggagaccaaagcggggagcggctcagtttgccggcttgctcaatgggtaaggcgtgatggctctaagcaggcctcagttgtctcgtccagagcaatgggcagcgacgcctgcccaacccctcctgagcgcccagcctccctttcccggccggccccgcccccgcgatcacgtgacgcgtgggggttttcccgttccccaggcgtgacgtcacggcggggtgcagaccaatgggcgcgcaggccggcggcgccggggaattccgccgccccgcccccgcccgccgcccgcccggcccggccccgcgccccgcgcagccccgggcgccgcgcgtcctgcccggcctgcggccccagcccttgcgccgctcgtccgacccgcgatcgtccaccagaccgtgcctcccggccgcccggccggcccgcgtgcatgcttcggtctgggccagcctctgggccgtccgtccccactggccgggccatgccgagtcgccgcgtcgccagaccgccggctgcgccggagctgggggccttaggtaagcggggctggggttcaggagaggggtctggggcggggctggagatgcggggattctggcggtcccggagtagtctgggggttcctatgggagtctaagggtttcgcgggggcagagtgagggttcctgagacactgtattagggcgtaggaagaaggcagagggtgatgagggggtacggcccgaggttcgagcgaggcgtcccgctgtagagtgagagggggcggggcctgaccctgaggcaaagaagggggcgtggcctgactcagagaaggcggagcgaaagctgctcttgggcggtatcggggcggggccgggcccagagagggagaagaggggcgggatccgacccggactatgagaagagggccgggcctgactcaaaaaaggaagcagggccctacgctgaggggtgagggggcggggcctggccgtgagggcaggaagggggcggggcctgagttggccgaaagaaggggaaggggcggggcctgactctggccgagtggaggggaagggcctgttacccaaaaaagcagggcggggcccgacacagagaatgaggagggggtggggcttgcctccagacggagaagcggagccttgacattgaaaaaattaaaagtggtctgaccctg[137 bp omitted]tgcctcagccccccgagtagctggaattacaggtgcccgccaccacacccggctaatttttgtagttttactagagacggggtttcaccatgctggtcagactggcctcgaacttctgacctcaggtgatccgcacgcctcggcctctcaaagtgctgggattacaggtgtgagcccttgtgcccagcgggatggggactttttaaactgagattgagatggggtcccctccaggcccaactttaagggagaaaaggagcgggccctgagtgtgatgaagggtggggcgaaccacagaaactaaaggccaggacctgtccatgatttagctggtaagcctggccagacgcaggggggcagtcagggcgaggggcctgatccagaggggaagggctagaagaggaaggggtggggcttccttgggatattctctggtcctctggctgccccccatcacctcctgagacgtttctccttctctgcagggtcccccgacctctcctcactctcgctcgccgtttccaggagcacaggtgagcagccctccacagttcctgcccactcgctcatgcaggatgaggttgggaggactccacagagatgtctctgtttgggggttcacgaggtccacctcagctttctcctgacagggtgcatccctccctgccagttgagatgggccccctaggttttcttacctcttggactgttaagagcgtgacaggtggccggg[138 bp omitted]cgtggtggcgggctcctgtagtcccagctactcgggaggctgaggcaggagaatggcgtgaacctgggaggcggagcttgcagtgagccgagatcgcaccactgcactccagcctgggagacagagcgagactccgactcaaaaaaaaaaaaaaaaaaaaaaaaagcgtgacaggtaaatcttaccacctatccatgcgcaaaggcttctttagagattcactgtggcttagtagaaggtaatcactgccatcctgggctttggagctggggtttacatactgctgtcatcgcccctccctgtgtgaatgtctgcaagtcagttccccagttcaggcctcagttttcctcatctgtaagatggacagaataacagtgcctctctttcagggaaattgagagtattcaatgaattgatacaggtacactttccaagcagtatctggcacacagtaagggttcagtaagtgttaactgttagtggtataataataataacgataataattattattactagacagtctataaca[141 bp omitted]ccacctcccgggttcagcaattctcctgcctcagcctcctgagtagctgggattacaggcacccgccaccacaacccactttgtgtctttagtagagatggggtttcaccatgttggccaggctggtcttgaactcctgacctcaggtaatccgcccgcctcagcctcccaaagtgctgggattacaggtgtgagccacctcgcctggccagacagtggttcttttttttttgagacggagtttcattcctgttgcccaggctggagtacaatggcgcgatctcggctcactgcaacctccacctctcaggttcgagcaattctcctgcctcagcctcccaagtagctgggattacagtcatgtgccaccacgctcagctaattttttgtatttttagtagagacagggtttct[133 bp omitted]atcatccatagcgctagttaaaacataatgtcgcctgatgtggtggctcatgcctgtaatcccggcactttgggaggccgaggtaggctcatcacctgaggtcgggagttctagaccaggctgaccaacatggagaaacaccatctctactaaaaatacaaaattagctgggcgtggtggcgcatgcctgtaatcccaaatattcaggaggctgaggcaggagaatcacttgaacctgggaggtggaggttgccgtgagccgagatcatggcattgcactccagcctgggcaacaagagtgaaactccgtctcaaacaaacaaacaaaaaaacagccggccgtggtggctcactcctgtgatcccagcactttgggaggtcgagacaggcagatcacaaggtcaggagttcaagaccagcctggccaatatgttgaaaccccatctctactaaaaatacaaaaaaaattagccaggcgtggtggcaggcacctgtaatcccagctacttgggaggctgaggcaggagaatcacttgaacccgggaggcggaagttgcagtgagcggggatcgtgccactgcactccagcctgggtgacagagcaagagcctccgtctcaggaaaaaaaacaaaaaaccatgtcaggccccacctctcgagtttctgattcagtaggtttgggatgagaaattatttgcatttttagcaagctcccaagagatgcctagaactactagtctataaagtcccccagccaaaattcagtgctgcccaaggaaatgcagaatctcaaccaaattatgacattttttcttatatacatttgccaggatttggagggcaggggtagtcctgttgttatgaatactcagtggctccagttagctgggtctgggcctttctctggagatataatcttgggatggacccaagttctggcttggccattgaagaagtgaggccggttccccaacaggtctgtgagtttagggaggatggcatcagtgacagacactgcccaagcggtggtcctgcgcaggaacaaggctgagacttttcttttttttgagacagagtctcgctctgtcacccagcctggagtgtagtgtcacaatctcggctcactgcaacctccgcctcccaggttcaagtgattctcctgcctcagcctcccgagtagctgagattataggcgtgtgccaccatgtccacctaatttttgtatttttagtagagacggggttttgccatgttggccaggccggtctggaactcctggcctcaagcgatctgcctgccttggcctcccaaagtgctaggattacaggcatgagccaccgtgcccggccaaggctgagacttttctggtccaagacctagatctttggtttcaaatgagagttatttctgatgtcatccattcaataaatatttattatgcgcctgttctgtacctggccttgtgccgagcagtgctgaggacaggcctggccctggggttccctacctagatgaggaggcagacacgtaaacaataagttaaatatgggattataaaatgtgataagggctatgaagaaaccttggggtcaatgatatttaataacagggtggggatacgagaactagtgagatagaatgggaaggaaaattccctttttgtttttggaggcagagtctcattctgtcgcctacactggagtgcggtggcgtgatctaggcttactgcaacctccgactcccgggttcaagccatcctcctgcctcagcctctcaaacagctgggattccaggcgtgtgccaccacacgcagctgatttttgtacttttagagaaacggggtttcaccacgttggccaggcttgtctcaaaatcctgacctccactgatccagccacctcggcctctcaaagtgctgggattacaggcatgagccactgtgcccagcgagaaaatccccttcattgtgaagggccagacatatgctggaccctggggataaaatgaggagaaacagacattattcccactcttcaatgctcccagtctataggagacaggtatgagtcagtgtaatgtgaggtcatgtgacat[132 bp omitted]caaaacctcatctctactaaaaatacgaaaattagctgggtgtggtggcctgtaatcccagctactcaggaggctgaggcaggagaatcacttgaacctgcgaggcggaggttgtggtgagctgagattgcatcattgcactccagcctgggtgacaacagcaaaactccatctgaaaaaaaaaaaaaaaaagaaaatgataaaacaaaggcacctgactttgagggactggagtgggggataaggggactctcttggataaaatggtcagggaagagctgtctaggatgtgacgtttgaccaaggaactgaagatggaggaggaggaagtcacgccatgcaaagaactgggggaagagcattcaggcagagaccagcctgtgcaaaggctgaggcagcacatacatagtcaatttcctgctctcacatctgctctcacgtggcccatcctggctgcccctgaatggtggcaagtccacgttgggggtaaagggaggcactgctatttgagcagaaacttgaataatttcctggctaatagaggacttgagataataataatattaactaagctttctggaagatgtcgcgtggtcagaacctgcactaagtagtttacctgtgtgattctgaatcctcatgttagttcctgaggtaggagctcacacctcattttgtagaggaagctcagagacggtaagtgacttgcccaaggctgcacagccagtgagtaacagctgagattcaaatcaactctatgtgactctacactccatgctctaaaatcatgcccatggccaggcgtggtggctcacacctgtaatcccagcactttgggaggctggggtgggtgggtcacttgaggccaggagttcgagaccagcctggccaacatggtgaaaccccgtctctactaaaagtacaaaaattagccgggcatggtggtacgagactgtaatcccagctactcaggaggctgaggcaggagaatcgctagaacccgggaggcagaggttgcagtgagccaagaatgcaccacactgtactccagcctgggtgacagagcaagactccatctcaaaaaatagaaaataggctgggcgtggtggctcacgcctgtaatcccagcactttaggaggccgaggtgcgcggatcatgaggtcaggagatcgagactagcctgactaacatagtaaaaccccgtctctgctaaaaatacaaaaaaaaaaaaaaaaaaaaaaagccgggtgtggtggtgtgcacctgtaatctcagctactcgggaggctgagacaggagaatcacttgaacccaggaggcagaggttgcagtgagccaagattgtgccactgcaccctagcctgggtgacagagcaagactccgtctcaaaaaaataaaaataaataaaataaaataaaataaaatattaaataaaagtatcttagcccaacaaggtaggcattattattgtgcccattttacagatgaagaagccaaggcacaaaaaggtgaagtaataggcttatggccccacaactagcaagttgcagagccaggatttgaacagaggcagtgaacccagagctccagccacagccgcccaggactcagtctccccctacagcccgggagcctctggagggtccaaagtctaactctgtctttgggtccccaggttcatccagcacagatgcctaagaaggattttcccagttcaagtgacttgaggttggccctgccactgacctagagcgtgtcccttcctctctgccagcctcagtatccccatctgccaaattggggggaccttggcaccctactggcttcacagatcccatgagataaggggtgcaggaaaactacctttcaaggggcaaaggtctggctgccaggagccactccctgagaacagaggaggacagatctagcagcggaacaggttcgcgtctataaatccccagccagagaccagcgcaggcagccctgggtgggacacctggctgcagctgccttccgttgctgtgtgattctaaggctcactggcggcctctgggcttccccttgtcctgtctatggaatgacgggaggtcggtttcgattcctccacgattctgtgaagggctgagctttcctggggaggtgaaaaggggcttccctgaggacccagcattactgtacctcctcacttaggaagcaggggtgaatctgggattttgggtggtcactgtgggaggacagggctggggtacagagcaagaggctgcctgggttcagatcagcctctttgcatctttttgttgttgttgttgtttgtttttgagacagtctcgctctgttgtccaggctggagtgcagtgacgcaatctcagctcactgcaacctctgcctcctgagttcaagcgattctcctgcctcagcctcccgagtagctgggattacaggtgcccaccacgatacccagctaatttttgtatttttagtagagacggggtttcgccatg[137 bp omitted]accctggggtggacttcagggagggaacacaccccaatttgtttggaaatttgggcatccactttttcctggtgctaagacccctttctaatgggttcccaaaaagacttcataatccctggtctaaatgtttttcgggaggcatttggcttagttggaggataccctgatgctgggaccccaacattagaggttgaaaggatggtagcccagaggagaagatgaggtttggggtttagtgccccagcaagtcagagcccagggtttcccaggacggaggaagacggaagggtcacaggagggacagggttggggaatctgtcttaaaagatgaaaagttgtgaccactttctggaccttacctttctctttctctttctcttccttccacagatgaattgggtgagtatcacagggcaggtttgcggggaggctgagggacccaagtgcctacagaagggggtcttggccttccttgttcagtgggggtgggggagaggtgtcactgtgtgacttccaggactgtggagggatttgaacgaagtcatgctcctaaggtacttagcagtgcttgacacttggaaaacactcagcacgccgggggctgtgtgactcacacctgtaatcctggcactttgggaggcagaggcaggaggactgcttgaggccaggagttcaggactagcctgggtaacatagtgagacccccatctctacacaaaatttttaaaaattagccgggcatggtggtgcgcacctgtagtcccagctgctcaggaggctgaagtgggaggatcacctgagcctgggaggttgccttggaagccgaggctgcagtgagctatgattgcaccactgcactgcagcctgggcggcagagcaagaccgtgtctcaaaaagaaaaccaattaaaataaaataatgttattaatcccctagtgagtacagacagacactgttttaggccctggggatttagccatgaacaaaaccaagtccctgccctcgcagagctgatagcccggtgtgggagacagaggaaaatgaacagatgagcaagataatgttagcctgggctgagagctgtgaaagaaataaacaggacgagggagagatggcctggagaagacacattaggttaggcttttctgaagagataacatacgagctgagaccaggaggagaagcagccagcatgggttgaatgggggaccgtgtg[148 bp omitted]ctgcctcagcctcccgagtagctgggagtacaggcatgcaccaacatacctggctcatttttgtatttatttatctatttatttagagatggaatttcgctcttgttgcccaggctggagtgcaatggcatgatcttggctcactgcaacctccacctcccaggtttaagtgattctcctgcctctgcctcccgagtagctggaactgcaggcacacatcaccatgcccaatttttatatttttagtggagatggggtttc[143 bp omitted]ttgctctgttgcgcaggatggagtgcagtgacgcaatctcggctcactgcaacctccgcctgacggtttcaagcgattctcctgcctcagcctcctgagttgctgggactacaggcacgtgccac[131 bp omitted]caccgcgcccagcctattatttattgagagacggagtctcactctgtcgcccaggctggcgtgcagtgtcacgatcttgacttactgcagtgtccgcctcctgggttcaagctgttctcctgcctcagcctcctgagtagctgggattacagacgtgggagaccattcgggctaatttttgtagagacggggtttcactatgttggccaggctggt[133 bp omitted]tgagagagagagagagagagagagagagagagagagagataaatgggatggaaaacgtctcgggggtaatcaagcctttttttttttttttaattttttaaagaatgggcgtcaccacccgttttttcttctcccgcagagatcatcgacgagtacatcaaggagaacggcttcggcctggacgggggacagccgggcccgggcgaggggctgccacgcctggtgtctcgcggggctgcgtccctgagcacggtcaccctgggccctgtggcgcccccagccacgccgccgccttggggctgccccctgggccgactagtgtccccagcgccgggcccgggcccgcagccgcacctggtcatcacggagcagcccaagcagcgcggcatgcgcttccgctacgagtgcgagggccgctcggccggcagcatccttggggagagcagcaccgaggccagcaagacgctgcccgccatcgaggtgggcccggcgagcggccccgggcgggtgggactggggcttcccctgcaccccggagccatccacatgcatttatacgtttatttgatggtggctgttgttgttattgttggaccagatattaattatactatcacctggcctggaatccaaaaggttcagaaaaaaggaggggtcggacatttggctgggcacggtgactcgcgcctgtaatcccagtactttgggagtctgaggcgggcggatcccttgatgtcaggagttcgagaccagcctggccaacatggtgaaaccccatctgtactaaaagtacacaaattagccgagtgtggtggcacaatcccagctatttaggaggccgaggtgggaggattagctgagcccagggaggtgcaggctgctgtgagctgagattgcaccattgcatagcagtctgggtaacagagtgagaccttgtctcaaaaaaaaagaaaaaaaaaaaagaaggcagatcgtggtgcggtggctcaggcttgtaattctagcactttgggaggtcgaggcgagcggatcactcgagctcaggagttctagatgagcctgggcaagacggcaaaaccccatctctacaaaaaatacaaaaattagccaggtgtggtggcacatggctgtagtcctagctacatggtagggctgaggtgggaggatcgcttgagcctaggaggtcaaggctacagtgagccaagatcgcaccactgcactccagcctgagcaacagagcaataccctgcctccattaaaaaacaaacaaatatatataacactggaagtaaaaaaagcaaaggtgattacttttggcagggtattaatgtattaataaggtacaggtaagttttatttttttgagacggagtcttggtctgttgcccaggctggagtgcagtggtgtgatctcgcctcactgcaacctccacctcccgggttcaagcgattctcctgcctcagcctcccgagtagctgggattacaggtccaccaccacgcctggctaatttttgtatttcttagtagagaaggggttttgccatgttggccaggctggtctcaaacccctgacctcaagtgatccgcatgccttggccttccagagtgctgggattgcaggtgtgagccactgtgcctggcctctttggtgtctgttaatctggatctgttcttcaatctgtctttgtgtttcgtgagttgaacatttgtgcagaacaggacggatgttttgtagaatgtcccacattctgaagctggtcgtggtggctcatgcctgtaatcctagcactttgggaggccgaggcaggcggatcacctgaggtcgggagttcgagaccaccctgaccaacatggagaaaccccatgtctactgaaaatacaaaattagtgcggcgtggtggtgcatgcctgtaatcccagctactcgggaggctgaggcagaagaatcacttgaatccgggaggcagaggctgcggtgagccaagatcgtgccattgctctccggcctgagcgacaagagcaaaactccttctaaaaaaaagaaaaagaaaaagaaaaaaagaatatcccacattctgggtttgttggctgtttccagattaggtcagattatgcatttttggcagaaacactccagcagtgatgctgtggccttctcagtgtctcacatcaagggacgtgggatgtcgttattcccaatattggtgatgctgagttggatcctccagctaatgtggtgactatcaggtctctccatgataaagatacaactttccctttgtaatgaattggtaagttatctatgggatgatatactgagatgtatcatcccatgtttaactgtattccccaacttctaatttctaaggcttttttttttttttttttggagacagggtctctctctgtcacagaggctggagtaaagtggcacaagcacggctcactgcagcctccacctcccaggctcaagagaccctcccacctcagcctcctgagttgctgggactacaggtgcatgccaccgtgcctggctaatttttgtatttttttgaagagttggcatctcaccatgttgtccaggctggtcttgaacttctggcctcaagcaatcctcccactttggcctcccaaagtgttggaattacatgtgtgagccaccgcaccggcctaatttctaagtcttcccaggcagttattctggctcagagtttttttttgttttttggttttttttttgatggaatcttgctctgtcacccaggctggagtgcaatggtgcaatctcagctcacagcaacctccacctcctgggttcaagcgattctcctgcctcagcctcccaagtagctgggattacaggcacgcgccatgatgtccggctaatattttgtacttttagtagagatggggtttcaccatgttggccaggctggtcttgaacttctgaccccaagtgatctgtctgcctcagcctcccaaagtgctgggattacaggtgtgagccaccgtgctcggaccccagagttggttttgatttccaagatttagaatggtaaatgcctaaccatagggaatgacctgtctccaaatctggattcaggatttttttttttttttttgagacggagtcttgctctgttgcccaggctggagtgcagtggtgtgatctcagctcactgcaacttccgcctcctgggttcaagcgattctcctgtcttagcctcccaagtagctgggattacaggtgtgcaccaccatgcccagctaatttttgtatttttagtagagacagggtttc[133 bp omitted]agtaggaaactgaggttaaaagaggggcagttacctgcacagggcacacagcaagtttactattgtaattaccgccatttactgagtgcttccatgtaccaggtactttgcatacctattttacacataaagacagtaagacccgagaggtttatcttgtagatggccagtggtagagcctggatttggtgccaggtcggacttattctaaagcctaatgggccaggcatggtggctcatgcctgtgatcccagcaccttgggagactaaggcaggaggatcacttgaggccaggagttcaagaccagcccaggtgacatggcaagatgcccgtctctataaaaataaaaaaattagccaggcgtggtggcatgcgcctggggtcccagcaccatgggaggctgaatggggaggattgcttgagcctgggaagtggaggctgcagtgagccatggtcacaccactgcactccagtctgggtgacagagaaagatgctatctcaaaaaaaaaaaagaaaaaagaaacaactaaagtctaatgttttttccacagtcccaactgacatctcaaggatgaaaagctttcagccctggagtctgcatgagtccgagactgttgactctaagcttttcagaatctcctactattacagcggggagctggttaaatgaatggttttaaccctatctgacccagtgagatttgtagacaatattacctacctctattcacagtcactcccaaagtccatattttattttattttattattattttttttttgagatgcagtctcgctctgtcacccaggctggagtgcagtggcatgcaacctccgcctcctgagttcaagtgattctcctgcctcagcctcccgggtagctgagattacaggcacctgccagcaggcccggctaatttttgtgtttttagtagagacggggtttcaccatgttggccaggctggtctcgaactcctgacctcaagtgatctgcctgcctcagcctcccacagtgctgggattacaggcgtgagccaccgtgcctggccaaaactccatattttacaccaaactgtagtataaaagagaaagaaaaggaaattaatacagcatatataatcacatttatttcaatatgtaaacgccccacaggatatatgaggaaggtggcagttgtttgtgactatatataggctccttgttaatgccgtggccacaaatgcagcctgacccagctgcgcagacttagtgacttatatgtcacacgtgcagggttgcggttggtgaggggattttccaaagtggcgaacaactcttggtctaaacaattagtgtgctggttgcaatctttgaaaattcagtgggtattacagttatgggaaactccagcctgggtgacagagttagacctcgtctcaaaaaagaaaaaggaaaaacaattatgggaaagaatattattggtgtcaaacagagcaagggccaggtgtgatgcatgcctgtaagcccagatgtttgggagactaaagtggaagtattgcttgagtctgggaggcggaggttgcagtgagctgagatcgtgccattgcactccagcctgtgcgagatcctgtcttaaaaacaaacaaacaaacaaacaaacaaatccactcagcaacaatagagcaagtttctgggatctggtcattttaaacaggtttcttattgactcgaatctttggcaggatgttcagaaggcttgctggctgtgggatggctgtgcgggactgtccctggtattataaactgtccagcataactggtcctgtctacttgcggtagggtccacatcagtgtcaaccagccaccccccaaatcccatttttcccctagggggcagcactcccccactgagaccaatggttaatggtattttataggcttgggctttagaagttcagagcaggcttcagaaggtatttaatgccagcagggctgagccagtgactcaaagctgccaagtgggactggccctgcctaacggggctggtttttatttgctgctgcctgtggctgctgagcaaaaattctggcttcacttgctatatcttccttttttaaaaaagaaaaatctggggaggccgaggtgggcggaccacctgaggttaggagttcgaggccctggaggctgggatcgcaccactgcactccagcctgggcaacagagagaatctgtctaaaaaaaaaaaaaacaattctggaaatccgaaataatgtgatgtcttataattttaattgtgggctccaagtttttcctaatcttttacttggaaaaaaaagttttagttttttcctgtctagtttttctttttaagttttattgaggtataattgatgtaagaaaaattgcacatacttaatgtatacattttgatgaatttgttattattcctttttttttttttttgagacagagttttgctcttgttgcccaggctggagtgcaatggtgcgatctctgcctctcaggttcaagcagtcctcttgcctcagcctcctgagttggtaggattacaggcctgtaccatcatgcctggctaattttgtatttttagtagagagggggttttgccatgttgcccaggctggtctcgaactcctggcctcaggtgatccacccgcctcagcctcccaaagtgctgggattgcaggcacgaaccaccgtgcccagcccttttgattagtttggatgataaaagaatttaaacctagagaccaggcgcggtggctcacgcctgtaatcccagcattttgggaggccgaggcaggtggatcacctgaggtcaggagttcgagaccagcctggccaacatggagaaaccccatctatactaaaaatacaaaaattcttggccgagcgtggtggctcaggcctgtaatcccagcactttgggagac[135 bp omitted]gaggcaggagaatggcgtgaacccaggaggtggagcgtgcagtgagctgagatcgtgccactgcaccccagcctggccaacagagcgagactccatctcaaaaaagtaaaataaaataaaaatacaaaaattagccaggcatggtggcaggcacctgtaatcttagctacttagaaggtagagacgagaatggcttgaacctgggaggcaggggttgcagtgagctgagatcatgccattgcactccagcctgggcaacagagcaagactccatctcaaaaaaataaataaataagaatttaaacctacagaaaagttaaaaaataatacactgagtatctttgaaaggtgagtgcctgttatttatttatttttttttaattttttttgagacagagtttcgctcttgttgcccaggctgtagtgcaatggcgcgatctcggctcactgcaacttgtgcctcccaggttcaagcgattctcctgcctcagcctcccgagtagctgggattacagacatgtgccaccacgccctgctaattttgtatttttagtagagacggggtttctccatgtcggtcaggctggtctcgaattcctgacctcaggtgatccacccgccagattacaggcgtgagccaccgcgctcggctgaaagctagtgcctttcatctatattcaccagttgacattttgccacatctgctgtgtctctcattctgtctccgcacagccaaacatacacacacacagatacatacatttttgttttgttttgagacagggtcttgctctattgcccaggctggaatacagtgacgccatcacagctcactgaagcccggatctccagggttcaagcagttttcccatcttagcctcctgagtacctgggactacaggtgcattccaccacacctggctgatttttgtattttttgtagagatggggtctgcacatgttgcccaggctggtcttgaactcctgtgctgaagcaacccaccttccctggcctccaaaaagtgctgggattacaggtgtgagccaccacgcctggccgacacattgtttttttgatgactcatttacaaatgaattgtagccatcatgctacttcacccctaattccttcaggatgtatctcctaatcataagctcctctgtagctacaatctcattaatcacctctaggaaaattagtaatcccatcaaatcatgtaatatacagtccatatttcaatttcccaattgtttccaaaatgtgttttatagttgtttcttcctccttaatccaggatttaaccaaggatcatgttgcatttggttgtcctatctcattagtctctctccttctctctttatttatgtatttatgtatttatttattttttgagaaggagtcttgctttgtcacccaggctggagtgcaatggcacgatctgggcccaccgcaacctccatctccagggttcaagtgattctcctgcctcagcctcccgagtagctgggactacaggcatgtgccaccacgtgcggctaattttgtatttttagtagagacggtgtttctccatgttggtcagcctggtctcaaactcccgacctcagttgatccacccacctcggcctcctcaaactcccaacctcaggtgatccacccacctcggcctcctcaaactcccgacctcaggtgatcccccacctcggcctcccaaagcgtcgggattacaggcgtgagccactgtgcgcagcccttctctccttttttaaaaaaattaagatataattgatcatatatagttaagattaaagctctgaatttttacatataatgtatacatatgtagtttacacagtgtaactacctaccacccaggcacccaggtcacaatacatgatttattctctttctctctctctctttttttttttttcttttttgagacagggactttgtcacccaggctggagtgcagtgacgcaatctgggctcattgcaacttccacgtctcaggcttaagtgatcctcccacctcagcttccagagtagctgggattatagatgcctgtcaccacacctggctaatttttgtattttttatagagacggggttgcccaggctggtcttgaactcctggtctcaagcagtcctcccacctcaacctcccaaagtactgggattacaggcgtgagccactgtgcctggcccatcatttgttgtctttt[144 bp omitted]gcctcccaagtagctgggactacaggtgcccgccac[190 bp omitted]tggtggctcatgcctgtcatcccagcgctttaggaggccaaggcaggcagatcgcttgagttcaggagtttgagaccagcttgggcaatgtagcgaaactccgtctctactgaaaacacaaaaattagccaggcatggtagtgtgcgcctgtagtcccagctactcaggaggctgcggcaggagaatcccttgagcccggaggcggaggttgcagtgagctgagatctcccgccaccgcactctagcttaggtga[177 bp omitted]catggtggtgggcacttgtagtctcagctactcgggaggctgaggcaggagaatggcgtgaacccgcaggcagagcttgcagtgagcggatccagcctgggcgacagagcgagactccatctcaaaaaaaaaaaaaaaaaaagcctgagtggcctaaaaaagcagcctgtagggcagatattatatgaggccccccagttcatcagttggaagcttctggtttaggatatcaaagtggcctttttttttttttttttttttgagaccgtcatattctgtcacccaggctggagtgcagtgtcaagaactcggctcactgcatcctccgcctcccaggttcaggcgattctcctgcctcagcctcccgagcaggtgggattacaggcatgcgccaccatgccgggctaatttttgtattttcagtagagactgggtttcaccatgttagccaggctggtctggaactcccgacctcaggtgatccgcccacctcggccttccaacgtgctgggattgcaggcgtgagccacctcgcccggcccaaagtggtcttaagcaaacacattccatcatcctggtcgcgggagaaggttggggagctcccaacagaggaccctagtggggagaggattggggagctgccaaggaaggccccaaggagtttggatggacgcaggcatcggtgatgggacccccaaagaggacttctcttcctgcagctccgggattgtggagggctgcgggaggtggaggtgactgcctgcctggtgtggaaggactggcctcaccgagtccacccccacagcctcgtggggaaagactgcaccgacggcatctgcagggtgcggctccggcctcacgtcagcccccggcacaggtacccaccccctgacctccgacctctcatccttgatcatggagattctaagcgactggaggccacccatgaaactttagagcagagggcagcttgggtaaaccctccccactgcctcttctaggtgggagacaggcctggggacagtggagggcctcacttaggcctggagccttgccacacacatattcacatacattttatccctattttgtagaggaagaaactgaggctcagagagggtaaggagcacagataattgatgacagagctgggatttgactgcagacctgacttaactgcaaggtctgttctttctcttactttacaattcatctttttttttttttttttgggacggagttttgctcttgttgcccaagctggagtgcaatggttcgatctcagctcactccaacctccacctcccggattcaagtgattctcctgccccagactcccgagtagctgagattacaggcatgcgacactacacccagcgaattttttggatttttagtagaaatggggtttcac[131 bp omitted]taacttttattttgcatatgtccacaaatgcttacacaacatacagtggctacatctaaaactttgagcattttttcatagtgcaaagagacagaaaggtagtgacacacttcactgtgttacactgactttgggtagagccctaaaggcagcacgcacttcagaggtagggctgagtattgctcacactcaggtctggaagatttaattttagaaatttttaaacttagtgaaaatataagttccgagagcagagatcttgtctcttacattccctgctgtattccgagtgtctggcatagtaactggcacatagtaggtgctcaggaaatatttgtggaatgaatgaatactgccatgttatgcaatttacagacccatcagtaatgggtgagagcacctgattctccacaacctcaccagcaccgagtattatgaaacattttgatttttgctattttgatgagtgccccaaaacaaaggcatcttcattggtgtttaatttgcagttttctttccttccttcct[132 bp omitted]gtgattctcctgcctcagcctcgcaagtagctgggactgcaggcgcccaccaccacacccggctattttttttgtatttttagtacagacggg[135 bp omitted]ttgagaccgagtctcactctgtcacccaggctggagtgcaatggcacgatctctgctcactgcaatctctgcctcctggattcaaacgattctcctgcctc[412 bp omitted]gcctcccgagtagctgggactacaggcacccgccaccatgcctggctaatttttttgtatttttagtagaggcggggtttcaccgtgttagccaaggtggtctcgatctcctgacctcctgatctgcccgtatcggcctcccaaagtgatgggattacaggcgtgagccaccacgcccggcctgaagttttcctattaaagatgaagttggccagtgttctcacatggtaaagataaggcatgttctggatcttctcaagaacctttgacatgcttatttttattttttgagacagattcttgctctgtcgccaggctgaagtgcagtggcatgatctcatctctctgcaacctctacctcccgggctcaagcaattctcctgcctcagcctcctgagtagctgggattacaggtgtgcgccaccacacccagctaatttttgtatttttagtagagacagggcttcaccatgctggccaggatggtgtccctctcttgacctcgtgatctgcccaccttggcctcccaaagtgctgggattctacagatgtgagccaccacgtctggccaaaaggtttattttattttttattgtttgagatggtgtctaactctgttgcccaggctggagtgcagtggcacaatctcggctcactgcaacctctgcctcccgggttcaagtgattcttttgcctcagcctcccgagtagctgggattacaggcatgcactactatgtctgctaatttttgtatttttagtagagacagggtttc[132 bp omitted]taatgctgggacccctgggcctgggatgtcagcccctgagagcctgagccccacagcagcatctgccagagccctcctgcaggttagggccacacttgcctgctcacgagcactcctctccctcccccgtcaccccctcagttttaacaacctgggcatccagtgtgtgaggaagaaggagattgaggctgccattgagcggaagattcaactgggcattgacccctacaacggtgagcaccccctgcctgacctgaccatcccgtcctcccaaaccccttgacttccgtgctcaccctggtcccctcaccactccaggccccaccgtctcctccagccccatcccttccccgttcccctgtaccccagagagggtctccacttcccaccctcagcctccccatatctcccccgacagctgggtccctgaagaaccatcaggaagtagacatgaatgtggtgaggatctgcttccaggcctcatatcgggaccagcagggacagatgcgccggatggatcctgtgctttccgagcccgtctatgacaagagtgagttgagagtgctgtggccgttaggattgcccttggctgcaggtgtcagaatgtcccgcttacagaggcatgaatggctcaggcgctgtggctcacgcctgtaatcccaacactttgggaggtcgaggtgggaggattgcttgagcccaggagttcaagaccagcctgggcaacttggcaaaaccctgtctctataaaaaatttaaaaattagctgggtggccaggcacggtggctcatgccggtaatcccagcactttgggaggccaaggcgggcaggtcacctgagaagtcaggagtttgagaccagcctggccaacatgccaaaaccctgtctactaaaaatacaaaaattagctgggcgcagtggcaggcgactataatcccagctactcaggaggctgaggcagaagaattgcttgaacccgggaggcggaggttgcagtgagccgagatcgcgtcactgcgctccagcctgtgcaacagagtgagattgcatctcaaaaaaaaaaaattagttgggcatggtgacatgcacctgtagtcccagctactttggaggctgaggtgggaagattgcttgagcccaggaggttgaggctgcagtgagctgtgatcatgccactgcagtccagcctgggcaacagagcaagtggtgaaatcctgtctctactaaaaatgcaaaaattagctgggcatggtggcacacgtctgtaatccctgctacctgggaggcggaggttgcagtgagctgagattgcaccactgcactccagcctgggcaatggagagggactccgtctcaaaaaacaagaaaaaaaaacatcaaacccaaaatggaatcttctagtgttgtagaatgaacaatctgtacaactataccaggcagcccaagggaagaggcagcataagtaataatctctctccctttctgagagagtgcattatattccacagaatcaccctggtagacttctgcttatttttcagtggccagagcttggtcccatggccactcctagttgcagggtggtctgggaaagcaagtgcttagatttttcaccctctatagagggatacaggcatagaagaggggactgggaataactggtaggttttagccaacccatagtgactgctgtaagcatcaaaatgggatattaattcagtcagggcatttatggatgcaagtgatagaatcccaacttagccgggc[137 bp omitted]cgtcgtggcgggcgcctgtagtcccagctactcaggaggctgaggcaggagaatggcgtgaaccctggaggcggagcttgcagtgagccgagatcgcaccactgcactccagcccgggcaacagagcgagactccttctcaaaaaaaaaaaaaaagaatccttacttaaataggcttaagggggaaaaaagagaataagttattctatttgttctattaacgagaaaaaatgcagatgtagcatagtgcttcaggtctggctgcatccagggcctcagtgatgtcattagatatctgtctctttctgtctctcagctgttcttcctccatgttagaatccatgcttatatcctacctgcctggcacctctccccgactcccaaagctgcttttagcttctcttacctaatagctttgcttaaagtctcaggtctatctctcattggcctggttttggtcatttgctcctttttgacaaatcagctttggccagagggatgcactgctctgattggccaggtctggggcatgcgctcaattactgctgagctaggaagtgggctcagccctgcccaatcccagttactaagatgaggggtggtcccttgagggaaaattggaggctgttaaaagaagaggggtcaggactactagatggggaaaacaacaggtgtccactacatgattacagtctatcaaactctcctcaaggaaccttctctcacctgggaccccatcaactctccctgaggtctgagggtctcccttaaacattttttaaaaattatttttattatttttttttagagatagggtctcactctgttgcctaggcagtcatgcagtggtgcagtcatagcttactgcagcctgaactcctgggctcaagtgatcctcccagttcagcctcacaagtagctgagactacaggcatgtgccaccacacctggctaagttttatttttaaaactttgtagagctagagtctcaccatgttacccaggctggtccagaactcctgggctcaaacgatcctccctcctcggcccctcaagtgctggcattacaggtgtgagccatcatgcctggcaattttttttttcttttttgagagagatgggggtctgctatgttgcccaggctggtcttgaacttctggcctcacgtgatcttcctggctgggcccccaaaagtgctgggattacaggtgtgagctaccttgcctagcaaaggatcttcttttgttttgttatttttttgtttgtttgttttttgttttgagacggagttttcctctgtcacgatggagtgcagtggtgcaatctcagctccctgcaacccctgtctcctgggttcaagtgattcttctgcctcagcctcctgagtaactgggaccacacccagctaatttttgtatttttagtagagtcagggtttcaccatgttggccaggctggtctcaaactcctgacctcaagtgatccacctgcctcggcctcccaaagagctgggattacaggcgtgagccaccatgcccggcaaaagatcttcgttttggacagacactcaccgggcttcagcttgagggctggcgattgttcgttaaccccttctgtccgagtgacttctttctccacctggactatgggttccatgaggatcagatgccctgccttttcaattccctacgtctccagggccccggggatggcacccactgggtgcccagtaaggctttggtgactgaattctcgggattttttttaatacacttcttcctcttgctccttcccagaatccacaaacacatcagagctgcggatttgccgaattaacaaggaaagcgggccgtgcaccggtggcgaggagctctacttgctctgcgacaaggtgcagaaaggtgaggggcctggggcagcaagcttgggcagagcggggtctggcaacttggaggggtagccagggagcccgggaagatgaaaggatgagaaagagctggttaaccagggcaccagagtgcaagggtccagaacactgtctttgcagtcagacacagctgatgggttcattcactccctgagtcgccttctcacccgtctgcgtaggacgacagagactcgtctgtggtgacccatgctgcaagctaggcggtgccatcacagagctcacgacatgtccagaggactctgatgttaagggtggaattgcataaatgaacgctttacggtggttctgataagcgctatgggtaaagcaaataggacaggagaagcaactccacttcattcatctctgttcaaatggcccttcctcaaacaggcttttaaaaaaaaaagacagctggtcaccgtggctcaagcctgtaatcccagcaatttgggaggctgaggtgggtggatcacttgagctcaggagttcgagaccagcctgggcaacatggtgaaaacccatatctactaaaaatacaaaaatgagggctgggcgcagtggctcatgcctgcaatcccagcactttgggaggccaaggtgggcggatcacctgaggtcaggagttcgacaccagcctcccaacatggtgaaaccccatctctactaaaaaacacaaaaatgagctggttgtggtggcatacacctgtaatcccagctactcgggaggctgaggcaggagaatcgcttgaacctgggaggcagaggtttcagtgagccgagatcacgcctctgcactccagcctgggccacagagcaaagctctgtctcaaaaaaaagaaaaaaagaaagaaaagaaaaagacagctgggcacagcagctcatgcctgtaatcctagcacagttttggaggctgaggcgggcagatcacttgaactcaggagttcgagaccagcctgggcaacatggtgaaaccctgtctctacaaaaaataaaaaatttagcaggtgtggtagtgtgcacctgtagtcccagttacttgagaggctgaggtgggaggatcacttgagcccgggaggcggaggctgcagtgagccaagattgcaccactgctctccagccagggcgacagagacagaccctgtctcaaaaaatcaaaaccaaaaacaaaccggctgggctggtggctcatgcctgtaattctagcactttgggaggctgaggtgggaggatcacttgagcccaggagtttgagtccagtctgggcaacatagcaagcccccatctctacaaaaaaaagttctttttaattaaaaaatagccaggcattaggccggctgtggtggctcacacctgtaatcccaatactttgggaggccaaggtgggcgaatcacttatggtcaggagttcaaaaccagcatggccaacatggtgaaaccctgtctctactaaaaatataaaaattagctgggtgtggtggaacacacctgtaattccagctacttgggaggctgaggcacgagaatcacttgaacctgggaggcagaggttgcagtgagccgagatcatgccattgcacaccagcctgggcaacacagtgagactctgtctcaaaaaatgaaataaaatagccaggcatgttggggcatgtgcctgtagtcccagcacttgggaggctgaggtaggaggattgcttaagtgcaggagttggaggttacagtgagctatgatggtgccaccgcactgcagcctgggcaatagagcgagactctgtctcaaaatagaataaagtaaagtgaagaaactggttccagagatatctagtaacttccccaagttataacagagttggtagtgaagagttctagccttcctgggtttccatcttggctctaacacttgccagctgtgtgaccttggacaagtgacttcacctctctgtgccttcattttcgtctttatacaatacggtacctaatagtaccttcttcatagagttgttgtgtgacttagaggcaatctatatgtaactgacacatataaagtctcagtacatggaggtactgtgatgacgggcgatgcagtaagacaagaaaaataaatagcaggcagagtagcatcatgaatcctgactcttccgctaccagttgtgtgatgtctcaacactttcaagcctcagtttccgtttttgtttttttttttaagaaccaggctctcgctctgtctcttaaatagctgggaccacaggcgtgcgccaccatgcctggctaattttttaattttcttgtagagacaaggtcttgctgtgttggccagtctggtcttgaactcctggcctcaagtgatctgccagctttagcctcccaaagggctgggattacaggtgtgggccactatgcctggacaggcaccttttttctctgctgactgtgcctggtatccttttgccataacagatcatagctgtgagtatgactgtatgctgtcttgtgagtcctcttactgaaccacctgagggtgatcttgaggatccctggacatgagggggatattaattcttttgtttgtttgtttgaggcggagtcttgctctgtcccccaggctggagtgcagtggtgcgatcttggctcactgcaagctccgcctcccgggttcacgccattctcctgcctc[136 bp omitted]gcctcccaaagtgctgggattatgggcgtgagccaccgtgcctggcaagggggatattaattctacctacctcttaaattgttataaggattaaatgagataatatatataaaaatacataaaacaaggccgggtttggtggcttacatctgtaatcccagcactttgggaggccaaggcgggcagatcacgaggtcaggagagcgagaccatcctggccaacgtggtgaaaccccgtctctattaaaaatacaaacattagctgggcgtggttgcacatgcctataatcccagctactcgggagactgaggcaggagaattacttgaaccagggagttggaggttgcagtgagccgagatcatgccactgcacttcagcctggaggcagagtgagactccatctcaaaaacacacaaacaaaaaaaaaccaaaaataaaattagccgggcgtggtggcatatgcctgtaatcccagctattccggaggctgaggcaggagaattgcttgaacccgggaggcagaggttgcagtgagctgagatcgcgccattgcactccagcctgggcaacagagcaagactctcaaaaaaaaaaaattttaaaaagggggaatattagtcttgattttaggggaggctgggcaagttgggagcacagtggtccagatgtcctggcttagctgatgtcccccgtttcctgccagaggacatatcagtggtgttcagcagggcctcctgggaaggtcgggctgacttctcccaggccgacgtgcaccgccagattgccattgtgttcaagacgccgccctacgaggacctggagattgtcgagcccgtgacagtcaacgtcttcctgcagcggctcaccgatggggtctgcagcgagccattgcctttcacgtacctgcctcgcgaccatggtaactacagcaacccagggtgacccaccacctcggagactaggtctttggccttggggagaccccagtggggatgggaaagaggcagaactagaatgcaggctcagagctacaaagacagtgttcagatcctggctctgctgcttactggttgtgtgaccttggcctctctgagcctcattcttctgtgcaaaatggaaataatagtagctgtcctgtgacatttggagagtatttaatctttcctcccctcagcatcctgcacatgcccgggcctgtgctcggtattgctagagacacagcagtgaccagcacggcccctagctgtgtcctcatgaggcttatagtcctgaggataggggacagcctgtccctacagagtgatgaccagagtgggcaggactggaatgaagtgctcaagggctcacattgcccagagggggtacctgacccagctgtaggtgtcagggaatgcttcttggaggaggggacagctgagctgaggacaggaggatgactaagcagggaagttttctagggaaatagtgagagtggaggaagagtgctttaaacagctggaacagcaggtgcaaaggtcctgaggccggattgtgcctggggtgctccaggaacaacaaagaggccagtgtgtaggccgggcgcagtggctcatgcctgtaatcacagcactgtgggaggctgaggcaggcggatcacctgaggttaggagttcgagaccagcctgaacaacatggcgaaaccccgtctctactaaaaatacaaaaattagccgggcgtggtggtgggcgcctatagtcccagctactcgggaggctgaggcaggagaattgcttgaacccgggaggcagaggttgcagtgagccaagattgtgccattgcactccagcctgggcaacagagcaagactcactacaggcacccgccaccatgcccggctaattttagtatttttagtagagaccgggtttcgccgtgttggtcaggctggtctcggactcctgacctcaggtgatccgcccacttcagcctcccaaagtgctgggattgcaggagtgagccaccacgcccagccaagactccatctttaaaaaaaaaaaaaataggcctggcacagcagctcacacctgtaatcccaacacttcgggaggccaaggcaggcagatcacttgaggtcaggagttcaagaccagactggccaacatatagtgaaatcccatctctactaaaaaaatacaaaaattagctgggcgtggtggcgcacacctgtaatccctcctacttgggaagctgaggcaggagaatcacttgaacctggcaggcagaggttgcagtgagccaagaccgtgccactgcactccagcctggtcaacagagcaagactgtctctaaaaataaataaataaataaataaataaaggaattaattattattgatgaattacttcttgtgtgtccctggtatctccttaacagacagctacggcgtggacaagaagcggaaacgggggatgcccgacgtccttggggagctgaacagctctggtgtgtgccctctgcccctttccacccccatccccaggttctggggaggggacagctgaccccactgccctgtcccaccccaggctggggaggaagggctgtcggggaacaggggtcctcatctctgccttccctcagacccccatggcatcgagagcaaacggcggaagaaaaagccggccatcctggaccacttcctgcccaaccacggctcaggtgggtcccagctacacataagcccctgtcccctgggtgggcagagggtaagtggcagccctgcttttctggcctcttcacgccctccaagagcagccacaaggcgagtcactcagcacttagccagcaacatagagtagaaagaatgagggctttggagacagaatggaagttctgatctcttctgggccatttccttgctatgtgaacttcattaagttgttctacctctcagagcctcagggactcctttgaaaaggcccagtacatacttagctcagtggtgttttaaaatttgatctatttcttctttctttttttttttttttggagatggagtctcgctctgtcgcccagactgcagtgcagtggcatgatctcagctcactgcaacttctgcctcctgagttcaagcgattctcctgcttcaggctcccaagtagctgggactaaaggcatacaccaccacacctggctaatttttgtattttttagtagagacggtgttttaccacattggccaggctggtcctgaactcctgacctcaggtgatctgcttgcctcagcctcccaaagtgctgggattacaggcatgagccactgcatcccacctatgatcacatttaactgcatttacagcaaaacccaaaataacaggggcttcaacaggatagaacgttatttcttgtctcacatacatagtctgtagggactgaaagtggctcatgcctgtaatctcagcactttgggaggctgaggcaggtggactgcttcagtccaggagtttgagaccagcctggccaacgtggtaaaaccctgtttctactaaaaatacaaaaattagccgagtgtggtggtgcacacctgtagtcccagctacttggaggctgaggcagacaaatcacttgaacccaggaggtgaaggttgcagtgagccaagattgcaccactgcactttagcctgagcaacagaatgagacccttctcaaaacaacaacaacaacaacaacaaaacaggcctggcactgtggcttacgcctgtaatcccagcactttgggaggccaaggcaggtagatcacgaggtgaagagagagagaccatcctggccaacatggtgaaactccatctctactaaaaacacaaaaattagctggatgtggtggcacatgcctgtagtcccagctacttgggaggctgaggcaggagaatcatttgaacccaaaaggtggaggctgcagtgagccaagatggtgccactgtgttccagcctgtcaacagagcaagactccgtctcaaaaacaagaaacaaaaaacagtccataggtaggtgttccagggatggtctggtgactgcatgatcatcgagagaccgaggcttctgccattttcagttcgccaactcatggtgcaaggtggctgttgtagctccagccattacgcccacgttccagttagcagaccttagtcacatgatcacatcaggctgcaaggaaggctagaaaatagtcccttgtgtctctaaggtttgtcttgttccaaaaagagagtccctctttttttttgagatagtcttgccctgttgcctaggctggagtgcagtggcacaatctcagctcactgcaatgtccacctcccaggttcaagtgattctcctgcctcagcctcctgagtagctgggattacaggtgcccaccaccatgccctgctaatttttgtatttttgggagagaaggggtttcgccatgttggc[132 bp omitted]tattttttcttaagtccccattatgcctgagaatgacatttattttttctgacaattttgggactggtgacttcccaacttgtgtctcccatggtctggagatttcactttttgggttgtctctgtatgttggggggctttggaacctcttctcctttctcactctcagggaaaactctccacagctgtgtaggagcatggtttcaaccccagttccacaacagctgtgtgagccttccatttactttccctcagtgccttagtttacttattattaattatttttagagataaggtcttgctctgttgcccaggctggagtgcagtggtgtgatcatacttcgctgcagcctcaaactgggctcaagcaatcctcctgcctcagactgccaggtagctgggactacaggcgggcaccaccacacccagctaacttttaaataatttttttgtagagacagggtctcgtcacgttgtgctgggattacaggtgtgaaccaccacgcttggccttcaatttacttattatctgagaatggtgatagtcccacacggattctccttgggattaagagggcacctaaggccaggcttggtggctcacacctgtaatcccagcactttgggaggccgaagcaggtggatcacctgaggtcaggagttcgagaccagcctggcaaacatggtgaaaccccgtctctactaaaaagataagaattagctgggcatggcacatgcctggcctgtagttccagctactcaggagactgaggcaggggaatcaacttgaactggggaggcagaggttgcagtgagccaagagcacgtcattgcactccagccagggtgacagaatgagactccatctcagaaaaaaaaaaaaaaaggccaccttgatatcacattttgcagggagtagggcatttgatttagggcctgatcagaagttagccctaaatcacactacacttctcttgtcttcatccccgtaggcccgttcctcccgccgtcagccctgctgccagaccctgacttcttctctggcaccgtgtccctgcccggcctggagccccctggcgggcctgacctcctggacgatggctttgcctacgaccctacggcccccacactcttcaccatgctggacctgctgcccccggcaccgccacacgctagcgctgttgtgtgcagcggaggtgccggggccgtggttggggagacccccggccctgaaccactgacactggactcgtaccaggccccgggccccggggatggaggcaccgccagccttgtgggcagcaacatgttccccaatcattaccgcgaggcggcctttgggggcggcctcctatccccggggcctgaagccacgtagccccgcgatgccagaggaggggcactgggtggggagggaggtggaggagccgtgcaatcccaaccaggatgtctagcacccccatccccttggcccttcctcatgcttctgaagtggacatattcagccttggcgagaagctccgttgcacgggtttccccttgagcccattttacagatgaggaaactgagtccggagaggaaaagggacatggctcccgtgcactagcttgttacagctgcctctgtccccacatgtgggggcaccttctccagtaggattcggaaaagattgtacatatgggaggagggggcagattcctggccctccctccccagacttgaaggtggggggtaggttggttgttcagagtcttcccaataaagatgagtttttgagcctccggggtttcgtctgttctgggcttgggaaacgccctagtcccttagtagcaaagaaagcctccaggctgggggctcaggcctgtcatcccagcactttgggaggccaaagcaggaggatcgcttgagctcacgagtttgagaccagcctgggcaacatgacgaaacctagtctctacaaaaaatacaaaaattagccgggcgtggtgctgcgcgcctgtaatcccagctactctagaggctgaggtgggaggatcgcttgagcccaggaggtggacgttgcagtgagccaagaccgcaccactgcactccagcttgggcgacagcgcgaggctgtgtctcaaaaaaat[131 bp omitted]gaaaccccatctctactaaaaatacaaaaattagccgggcttggtggcgcgcgcttgtagtcccagctactcgggaggctgaggtgggagaatagctgaaacccaggaggcaaaggttgcagtgagcctagatcgcgccactgccttctagcctgggagacaaagagagactccgtctcaaaaaaataaaattaaataaataaataaaataaaaaagataaaaagataaagcatccaagctcttcccttctccgctctcccacttcttcctcgggatcccgcccctctcgactctaggacccgcctctctcgtcggcggaagtgcgctgcgcggccctccaccatgctccgccccctccccctagcgcggcctttcatttccgcttccggtgcgggccgcgcgcgagcgcagcggtgggaggcggcgaccagccggtgagtgcaggctgcggctcgacctcccggttttcgggcaggcctcagcccagcttctccctttcctcaggctctccccatgctgctgtgggcttctgctgcgtcccggccccgaggatcgctcgtccctcaccccattaggcctgacgggcctcaggccgagcccgtgccccggctgtgggccagaagttgccgcgtcgaactcggccttcggcccagcagcttatcacaggccccgcccccttgtcaaaaaaaaaaacaacaaaaaaaaaacccagcccaaatcctcaggccgcgacgcgatccacaagccccgtccaaaccttcggtctccgccctttcccgcaagccctgcccccaagctcagcccacgccctcctgtcagccagctccgcctctctcaggctctacgctctttttctttggatgctctccccaccccgccatctagatcccatctttagacctcagcttcactctggtctccttgcaacactccctccccgtgttcccactccctctagcatcttcatcttccgccacgcccttcacctgtcctcgacctccaccttcatacaactgcactgttcccttaaaagctttctccgatttcctccacctgccttcatccttattctccttatccctctaccacccagactcatacccaaccccacgcatggcccctagtgggagccttttcagttcttctctttctcttgagctccagccttaagtgctcagggtttgccttctgaccctacttcaaacactgctgatgtttcaaaacctttcattcccgactccagcgcgtggaatctaggacacccctttcccagtgatgctcacctcagaatcacctgagggtttttcagaatgcccaagcttctagatcgaagttgttagggatggacttgaacatctggcatactgttctgcagcttcacttctgctccctgaagctaagagatgtgttgtttgggatcgactctgccaccaacttgttagatgactttgattctgcccatacgggtttcacagaccatctgactttcctggtcccttcatccctcaggttgaggccccaggcttggcctcaccacaatgtggcacgaggctcggaagcatgagcggaagcttcgaggcatgatggtcgactacaagaagagggcggagcggagacgggagtattatgaaaagatcgtgagtaactggccttttgtctggggtgagggaccctgggttggggggcacagctggtcatcctggtaaaatctgggcttggaagtatgtcaagacaagaggctcatttcctcaggagtatattcattaatcttttcttgaggataatcattggtgggatcccaagggcttctgtttgttgtagcatactgtgtcgtttggtgtggcctcccagtgccgatccggtgttagcaagaaaaagggaagtctctgtaaccctcagagcagtcctgacgttagactggccacctccagaatgtctgtttcgcttattgctgtgttccccattcccagaagagctcagccactcttgagatttggcttggcacacaataggagtgagtattaagttggcctggcacagtggctcacgcctgtaatcccaagtggatcacctgaggtcacgagttcgagaccagcctggccaaaagggtgaaaccccatctctactaaagatacaaaaattagccaggcttagtggtgtgtgcatgtagtcccagctacttgggaggctgacgcacgagaattgcttgagcccgggaggaggaggctgtagtg[134 bp omitted]aaaccccatctctattaaaatacaaaaaattagccaggtgaggtggcgggtgcctgtagtcccagctactcgggaggctgaggcaggagaatggtgtgaaccggggaggggggcagagc[133 bp omitted]cctctcctgtctgatgcttcagttgtttttgcggggaagaccaaactatccctggcctaaaagacccttgtggtctgaccactcagcttcatactcggacagctccactggccttctatttctgccaccacagggctttggcctatattaccccccctcacctatttaactcctgtgtatccttgggatcccagcttgaaatggcacctgttttctaggttcagtgttcctgtcagatgacatttatatagacctttcccagttattcctgtattactgccccagcctcctccctggtctgctggcctccagtcctggctcctccagtctgtccttcctagaagagtccaagaggcctttctaaagcacaaaactgaccctgtcccttcgttgctcagagcacctctatgcctcctaagtgcccttgagagaaagcccaggctcctcactgtggcctttagggtcctgcatggcctggcctttgcccttcctccagactcacaccaccccacactctgccttgttcctttgcacaagtcattttggcctccttgctattcctccactgacccaagcgctccccagccacaggacctttgtatgagctcttcccatacctggttaactactgcttatctgtcagatctcagtcctcagagaagtcttgtttcccaagctcagtcaggtgtcctctaaaaatgccataatcatagctccctttccttcccctttgtggaatttaacacacttaagatacacatacatgggcctggtgtggtggctcacgcctgtaatcccagcattttgggggccaaggcaggtggatcacctcaggtcaagagtttgagaccagcctggctaacatgatgaaacctcgtctctactaaaaatacagaaattagctggaggtggtgaggagcctgggctttctctcaagggcacttaggagccatagaggtgctctgagcaatgaagggacagggtcagttttgtgctttagaaaggcctcctggactcttctagggaggacagactggaggagccaggactggaggccagcagaccagggaagaggctggggcagtaatacaggagtaaatggtaatcccagctactcgggaggctgaggcaggagaattgcttgaacccgggaggcataggttgcattgctctccagcctgggcaacagagtgagactccatctcaaaaaaaaaatttatatatatatatatatgtgtgtgtatgtatgtatacacacacgcacacacatacgcatacacaggttgaacatccctaattcaaaatccgaaatgctccaaaatctttttttttttttgaggcagagtcttgcttagtcgcccaggctggagtgcagtggcatgatgtcagctcactgtaacgtccaccccccaggttcaagctattctcctgcctcactcaacctcctgagtagctggaattacaggcatgtgccactatgcctggctaatttttgcacttttggtagagacagggtttc[143 bp omitted]cccactataagtggaaagtttcacatataagtactttacacaaactttgtttcatgcacaaaattatttaaaatattgtatacaattaccttcaggctgtgcttataaagtataaatgaatttggtctttggacttgggtgccatccctaagatatctcattatgaatagacaaatattccaaaatctgaaaaaatctgaagcacctctgatcccaagcacttcagataaggaatactttgtgtgtgtgtgtgtgtgtgtgtgtgtgtgtgtgtgtgtgtcccgtctctactacaaatacaaaaaattagctgggcgtggtggtgggcacctgtactcccagctactcgggaggctgaggca[137 bp omitted]tgcacatacccagctctgtgagactggggactaattatatttgggtcacgtttgtaccctagggttgggtccatcaaatatggtttgaaagaatagatgaataaaacaatattaacaatagtaattaaccatttaattgatccttcgcaggcacccccaggccatgtgagagatgcaggattttttttgaatccccacagtcacctgtgagacagagaccgctcttacttccactcagcagagaagaggaagctctgagagctccttgcttacctctgccacccaggaaggaaccacggggctaaagggagaactcatctccgatagtgtcagaaagatgtgatcatcaaggcaaggcctgggtctctgttggtcatagttgaggccccagaagtggcctaggaacacagcactcaggaatgaatagctaccttttttttttttgagatggagtctggctctgtcgcccaggctggagtgcagtggcacgatctcggctcagtgcaacctccgcctcccgggttcaagcaattctcctgccttagcctcccaagcagctgagactataggtgcccaccaccacgcccggctaatttttgtatttttagtagagacagggtttcaccatattggccaggctggtctcaaactcctgactgcaagtgatccgcctgccttggcttcccaaagcgctgggattataggcgtgagccaccacacccagcctagctgccatttattaagggcccatggtgcgccagacccagtgctcaccagcttggcatagtagtcctctgaacaggcctgcgaggtaggtattgatcatgcctgtgttaaaggtgatgccacgataacagctaacgctgttgggcagttctgtggtaaccactgtgctaactacttggcttgtgtctccgcttcatcaaagccacacccaagactaggaggtggttcttactatttccattttacagaggacaaaactggagcacggagatacgtggcttacagtcacatagcatgagggcagagctggcactataacccagtctctgacccttaacctctctaagcttttcacctgcgccttatcatgcagaaatagaggttcaaaaagatgaggcatagcaagaccccatctctgcaaaaaataataaaaaaaaattagccaggtttggtggcatgcgcctgtggtcccagctacttgggaggctgaggcaagatgagacctgggagggtggggctacagtgagctgtgattgcaccactgcactggaacctgggtgacagagtgagaccctgtctcaaaaaagaaaggtgaggtgacttgcccaaggcaacacagccaggaggtgagatcccatcatggttagtccttagaatttgggagtcatggggctctgggttcaaattctagcgatcccacttatctatagtgtgacgtgggcaagtgactgcctccctgagcccatttcctcttccacatgtgaaaggatgtcacatggacaatcagctttggctctaacaaacctagagcatccgtcagtggcttaaacaagatagatgtttatttcttagccacagaaaagccaagaggtaaccagttagctcggggacctaagccgcttctgttttgttctcctgggcacagcttctcttcctagtgttgcatcgaggtctaagaggctctggccatcatgtcttcattctatccagcagggaggaaaaagggaggaaaaggggcaaagcgctcatgccatttgttgagaaagtttctaggccaggtgcagtggctcacgcctgtaatcccagcacttcgggaggccgaggcaggaggactgcttgagcccaggagttcgagaacagcctggacaacatggtgaaaccccgtctataccaaaatatacaaaaattagccgggcatgatggcgtgcatctgtggtcccagctcctcaagaggctgaggtgggagaatctcttgaacccaggaggtggaggctgcagtgagctgtgattgtaccactgcactccagcctgagtgggagaataagaccctgtctttaaaaaaaaagtttcgggatgttttcccgtaacatttccactcctcccctgctgaccaggaagtagtcttatgaacagccgtgaggaaggctaagaggtgtagactttattttgggtcgccctgaccagatatatttggagttctgttactgttgtagcaaagggaatagatgttggttgccaattaatggtttgccactaacagtggagacaagagcatgtccttcgatgttgttggagtgttggacacatggaccactgagagcagcctggccagcgtcgctatcgctcagtaaatattagctcttgttattgacattactgttgctgatagaactggagtttggatccaggtggagggatggtgcagaggaaggaaggctggagctgagactccaggccccctccctgttagcagggaagcttgctgcattgtattccccctcaggacagtggtgacgaccaacccctctcactggataatggggaagagctcaaagaaccaatgtctatgggtgctttgtggtgcaggcctgtacaagcggcctttgtccctgtatgtgaacgtgacctgcattccgatctgggctgccaagctgtggagtatggctgggccgtggctgatggctgctttgaggaggggactctcatctcagccttgggccgagagcagaggctgtggagcgagtgtcagtgaagctgcggtagattgtggcaggctgaatgagtatgtccagatgcagttggtttctgtcttcctgatttgtcgttggtgcctgctttctctccctgtcttcagtcccaagcagactccggttctgtcattgcttctgtccttgtcaactttcctttttaatcagtggtttggataaagaaacagaatcctctgttgatacggaaataagaagtaaacaggtcgcagctcaggcgtcgcctcctccaggaagctccagactgacccccaagtctgggtcaggtgttccccctgtgggcccccatctcagcgctgtccactctaggttgtccttgtatggggacaagtctgtgtcccacactggactgtgagcccatgagggcagggccagggctatctcagttactgccataccctagcacaaggtctgcttaacagttgaatgaatgaatgaatgaatgagtaacttcatgaactcctctgacacaatctgatcctagagacaggataatccagtggttaagagttggttttgggccgggcgcggtagctcacgcctgtaatcccaacactttgggaggctgaggtgagcagatcacctgaggtcaggagtttgagaccagcctgaccaacatggagaaacgtcatctctactaaaaatacaaaattagctgggcgttgtggcacatgcctgcagttccagctacctgggaggctgaggcaggagaatcgcttgaacccgggaggcagagattgtggttagcctagatcacgccattgcagcccagcctggacaacaagagcaaaactctgtctccaaaaaaaaaagtggattttggatcttgaagaggtacttatacacttatgttcattacagcattattagcaatagccaagaggtggacgcaagctaaatgtccattgagggatacatcgagaaagaaaatgtggtctctacacataacgcaatattattcaatcttaaaaaagaaagaaatcctgtcctatgctacaatatcgatgagccctgaagatgttatgctaagtgaaataagccagtcgcaaaaagacagtattgtatgatccgctgataagtatctaaaatagttaaaccttgcttgagcccaggagttccaggctgcagtgaactgtgatcacaccactgtactccagcctgggtgacagagcaagactccatctcaaaaaaaaaaaaaaaaaaaacagagagagagaggaagggaggaagggagctcacttcggcagcacatatactaaaattggaacgatacggggattagcatggccactgtgcaaggatgacacaaaaattcgtgaaaccttctgtatttttggtaaagaaaaaaaaacctaaaagaaaagtcaaaccctcagaaaaagaaaatacagtgcaggttgacagggatggggggaggaggaaaggggaagttcagttttgtttcagttttgtaagatttaaaaagttctaaagctctgttgcaccacagggtggatgtagttactactactgtactgtacacttaaaaatgttaagatggtaaatgttttctaccacaataaaaaaattattcttggccagatgtggtggctcacacctgtaatcccagcattttgggtggctgaggcaggcagatcacctgaggtcaggagttgaagaccagcctggccaacgtggtgaaatcccatctctactaaaaatacaaaaaattagccaggcaggttggtgcatgcctgtactcgggaggctgaggcaggagaatcgcttgaacctgggaggcggaggttgcagtgagccgagatcatgccattgcactccagcctgggcaacaagagtgaaactcttgtctcaaaacaaacaaacaaaaaattactcttaaaaagcaaataaataaaaagaagcagattttgtagtcaggcccatctgggttcaaatcctagttctgcttattcctaatgtcaggcaggtggaccccatggctttgagcctcagtttact[155 bp omitted]caaaaaattagccaggcattttggtgcatgcctgtactcgggaggctgaggcaggagaatcgcttgaacctgggaggcggaggttgcagtgagccgagatcatgccattgcactccagcctgggcaacaagagtgaaactcttgtctcaaaacagacaaacaaaaaattactcttaaaaagcaaataaataaaaagaagcagattttgtagccaggcccatctgggtttgaatcctagttctgcttattcctaatgtcaggcaggtggaccccatggctttgagcctcagtttact[133 bp omitted]agccctgtctctactaaaaataccaaaattagccaagcgtggtggcgggcacctgtaatcccagctactcgggaagctgaggcaggagaatcccttgaacttgggaggcagaggttgcagtgagccgagatcgcgccattgcactccagcctgggtgacagagcgagactctgtttcaaaaaaagaaaaagaatagtatgtttcttccatggttgggacattcgagtgagacagtgcacataaaacagtgcctggtttttagtagggttcattgacttttccagaatctcccaacagaaccaggctctggactcctggtgtttactcccggctcagtgcttattcctttctgtgaagctgaccctgccagtagcttccctgtacctgccaaattctgtcctgcaaacagtgtcccatgagtcctggctgtgggaactgggcatttggcctggagcagcctcaggagtatgatgggatcttggccttggacttggctggcttgtcccagggcagagggagctgggtgcgctgtgtggccccagctgaggaatcagctaaggaatcgagggaggcaggcgaggtgcagcatgagtagctggactccagcagcgccacctcgctgggcctgtggtcttgagtgttccttagactcagtttctttaggtgtgaaatgagagtcacagcagcccagcacctggcacatagtgagtgcggggttgaaactagccaggtattagctgtggtcctggtgagtgactcagctccttcagcccggactgcaccttctcatctgctggctgagggctgagatggagacagagtgaggatgtgcaggagcttggaaacttggagctggtgtttttttcctgaaggggctcagagtcttcatctgttagtaaggattattcctgtctttccttcattgggtgttctcaagcgcctgctgtgggccaggccctgttctaggctttagggatatagcagccaaaacagagccctgcctcctgggagttacgttctaacatgggagaaaggtgatgaatgaatattaggtccagtggcaggtggtagcgggtgctcaaaagaaaacaagtggagttaagtgagtgaattgtgtggtatatgaattacttctcaataaagccacagagtgaaggagctggggtagataagtggggagctatttagatagagtcactgaggacggcttttaggaggagatctgaaataagcgggggagcagaagcacagaggtccgagcagaagcacggggcatgtctggaatgcccaaggaatggcgtgaggcgagggcctgtgtgcctggagcagagtaggggagggaagaaatcagagagggacaggccagcacctgtgagggctgagtggttgggagtggggtggggggtggggtgcggcccaacatgtgtcagcaaatctcctggaggcagagcccagcctggaccagactgcatccacacattgaaagatgaccaacatcattagccatcagggaaatgccagtcagaaccacaagataccacttcacccacactaggctggctgacatggaaaggacagactataacaagtagtaggccaggcatagtggctcatgcctgtaatcccagcactttgggaggccaaggcaggcggatcacctgaggtcgagagttcaagaccagccagaccaacatggagaaaccccatctctactaaaaatacaaaattagctgggcatggtggcgcatgcctgtaatcccagctactcaggaggctgaggcaggagaatcgcttgaacctgggaggtggaggttgcagtgagctgatatcgcaccattgcactccagttgaagatcctgatttctctatattcttgtcactacttgtgttttgttttgttttgttttgttttttgtttttggagatggagtctcgctcttgtcccccaggctggagtgcactggtgggatctctgcttattgcaacctacctccacctcctgggttcaagcgattctcttgcctcagcctcccaaatagctgggattacaggcgcctgccaccatggctggctaatttttttgtatttttagtagagacagggtttcaccatgttggccaggctggtctcgaactcctgacctcaggtgatccgcctgcctcggcctcccaaagtgctgggattaccggcgtgagccactatgcccgacccactgcttgttacagtctgtcctttccatgtcagccagcctagtgtgggtgaagtggtatcttgtggttctgattggcatttccctgatggctaatgatgttggtcatcttcccatgtgcggatgcagtctggtccaggctgaagtgtccacaccagtctctaaatgaacggcccggaggatgggaggtgaagagttaagggggctgatattttagagagcgaggtcttcgtactggctatgcagaagattgagccaccacctcgagaggaaccaatagcttatttcttcaatttctttttttttctctttttgagatggagtcttgctctgttgcccaggctagagtgcggtgacacaatctcagctcactgcaacttctgcctcccaggttcaagcgattctcctgcctcaggctcccaagtagctgggattacaggcatgtgtcaccacgcccagctaattttttgtatttttagtagagcctgggtttcgccatgttggtctggaactcctgacttcagatgacctgcctgccttggcctcccaaagtgttgagattacaggcgtgagccaccatgcctagccaattcccttatttctgaaggttagcaggttggttcacctctgaggtatggcccacttgaccttagaagtgagcttgctgcaggccgggcgcggtgactcatgcctgtaatcccagcactttgggaggctgaggcgggtggatcacgaggtaaggagatcgagaccatcctggctaacacagtgaaaccctgtctctactaaaaacacaaaaaattagtcgggcatggtggcgggcgcctgtagtcccagctactcagaaagctgaggcaggagaatggcgtgaacctgggaagcagagcttgcagtgagccgagacagcaccattgcactccagcctgggcgacagagtgaggctccatctcaaaaaaaaaaagaagtgagcttgctgctaagctcggttgtgtgtgagggggtggggtttggagctctgttgggtggtgacctcagtcctgtttacccctgcagaagaaggacccagcccagttcctgcaggtacatggccgagcttgcaaggtgcacctggattctgcagtcgccctggccgctgagagccctgttaatatgtaagactgatatggaaggcaggggagtgtctgaagtctgggagtcaaaacggacctggggtggtgtagagtgtggagcagagactgaagtatggacagacctttggggactcagaggcagggaaggtgtgacccgcatatgaaggtgatagtcacagggtgtaagaacaatgagcaggggttggggtggaggccccagagtagcagtcatggttggaggacttagaaatgggtggagccagggccagaggcccagaggaagcagagagtaggttgccagacccgagctggctcagggtgcctggggcccgcccctcaaataccctctaggacctggttcaagttccccactattgcttggttgtgagaaatggggccctggtgtccccaggggcagtcagatgactggcctgtttcaggtcccaggagcctgaatgtggattcagggaggcttgcaacagaagggactgagagctgggggttgaggtgagggtcatggcatggggaccaaagcaggctgagggccaggcttctaagcctcagctggcagggagcaggtgctttgtgtcctgggcagtatggaccctgaggttcttgctttcttgctcccctcccacttcaggatgccctggcagggggacaccaacaacatgattgaccgattcgatgtccgtgcccacctggaccacatccccgactacaccccccctctgctcaccaccatgtaagccacctcccagggggttgccaggcacagcgtcatacccaggagcccctgttcttttcccagcctacctgtcaccttcctaggagccgttcctatttggtaccgccctgagcctgagggggatgcctcatttcccttcctgctggcttggggggggatccactccttctctctgatttcaaggtctcgcccttccctaaagctccccagaacaggagtcggacgaacggaagtgtaactacgagcgctacagaggcctggtgcagaacgactttgccggcagtgagtgatctgtggggggacgtggggtgtggggtttgagcctggagcctggaagacctagataggtttgggaagaaaagttttatccacatactttctactaaagggccttgggttccggctccagctctacgatagactcactttgcctgcatctctttccccttctagatttggtataggggatgtctgccgaatgggttgttcccagcagagtcacgtccatataccatgccttctgactctgtggtccgtttttctttaaaaaatagagaaaatagcaagaatatgtttttatttttatttatttatttatttgaggcggagtttcgttcttgttgcccaggctggagtgcagtggtgtgatctcagctcactgcaacctctgcctcctgggttcaagtgattatcctgcctc[131 bp omitted]accttggcctcccaaagtgctggattacaggtgtgagccaccacgcccagccaagaatacgtttttaaaagcatttagaaagatggggtctcactgtgttgtccaggctggtctgaactcctgggctcaagtgatcctcctgccttggcctcccaaattgctgggattatagacatgaaacactatgcccagccaggaacagattttttacctctgtgtattttactctgcccgcacagatcagattgtgagctctaaaaaggaaatttctccttgatttaaatgaatatttgccagcatttgacaatttgccaagtgttcatgtatgtccaggaattttctcccagcccagccttatcaccattgtcattttccaaatgaggaaacagaggctcagggaaacttctcgctgctctgggcttgcccagggaggtttggatcccaacagacttgggcttttttgtctgtattatcattacatctgcacaaccacctagcaaggtaggggtgacaccccgttttggggttttttgttttttttgagattgagtcttactctgttgcccaggctggcatgcagtggcgcaatctcagctcactgcaacctccacctcctgggttcaagtgattctcctgcctcagcctcccaagtagctgggattaccggcgcatgccaccatgcccggctaagttttgt[167 bp omitted]tgtccaaggagctgggattctccacgtgtccttaaccactgctccctgttgatggaaagctcctaactcacctaccaagaaggacttgagattccctttcttgggattccctgtggagttaagggaaggatggagttctctgctgggtttgtcccttaccacctggcaggtctcggcttcctcctcgagaagggtggtggtgttgattttgttgcgtggggtggttgtaagagttgagtgagatgatgtgtataaaaccccagcaccgagcctggcacagtcagccctccatgtgggtttgctagtccagtatttgtttatttctaagatagatgcttttttgattttctaaaatcagaggctgccaaaattctagtgatcactgaggccttagaatcagggacatgtgttataattgatactgtttttgccatcattccaggccacatggcttcctggtggtagagccagggttccccttagtttcgcctcactctgcatttattcattcacttccacaaacagtcattgaacacctgcggtgtggcaatggtaggggagagggcagcagctccataatcaatgtcagtgatgccaattgcaaaccaaggtgatgtgacagacagtgtgccattctctgagaaaaataggacagaagtcctggatagaagctccctgggaggcacggataggccacaggattccaggccgagagcagcctgtgcaaagccctgtgtcagccaggactgtgagcacactggaggggcagagagaaggcccgtgtggctggagcagggagagcgagggcgcttgtgcaagacagggtcagcagggcctctcttgggctttggagacaacaagtagaaattggggtatctgctagaacaaggaagggccgtgctacatccccttctggcctgccagcctgcccacctcttgttccagatagaaaagctgaggccagccgggcacggtggctcatgcatataatctcagcactttgggaggttgaggcggtggatcacctgaggtcgggagttcgagaccagcctgaccaatatggagaaaccctgtctgtactaaaagtacaaaattagccaggcacggtggcgcctgcctgtaatcccagctactggggaggctgaggcaggagaatcgcttgaacctgggaggcggaggttgcggtgagccaagatcgcgccattgcactccagcctgtgcaacaagagtgaaactctgtcttaaaaaaataagaaaagaaaaactgaggcctagggagggaaggaaggaaggggacttacaacccactgtcccacagcgagtcagggacacgtgtctcactgcagggaagatcaggaaggctctggtacattgttgagtcccccaggctgggtgttgggggtgcaggagagcccaggtcatcccagcccacacctaacttaaaatgagccacagagaggcatgcagtggagtgacctgtgcagtcagaatggcgtgtggcactcaggagcaggttatggttctgaagggtccagccagaggcctccagaaacagtgagaatggtggtagagtgcccaagtaccaggccaggcactcactctgcccgtggtcccattttacggaaaaggaaactgaggcacagatgtgttaagtcccttgaccaaggtcgtgtgtccaaggctctgctgcagttgcttgtgtcccaccagacatagtttgattatctggaagtggtgactgccccccaaggtgcactggggttgcacctgtcttcctgccccaccgcacccttgtgttcccccactgaattcctagtgtccccaacccactctgacctggggtctcttgtttgctgcagtctcagaggagcagtgcctgtaccagatctacattgatgagttgtacggaggcctccagagacccagcgaagatgagaagaagaagtgagtcggggtctggggtgcagggggttgaggaggcaggagggctgggagccccagccaggcatggcctcttccatcctgtccaccagggtctccccgaaaccaaggatggtgttcagcacacagtcagtgctcaattaataactgtgtagaggaagaagccctgtcagggggccccggcttgccgagggctctgcgttacattttcagcttgggaagtggtgggaggtgcaggccctgtggtgagacagccctgggtttgagtcctggctgtgaggccctgagtgggaattgtctgagccttgctgtgcttccctgtaaaatggggctggcaggaggccctactgcctggagttgggaggcatgcaggagatggggcttgtgaagtacctattccagcacctgccatgtagtgagcttgcagtcagccctagctgatgtcactctggagagaggcttcttaaagccgcgtccctcaaggagtagctggggagacccgggccttatcctggagcagctgcctctgaggagcagtggccgagcagtctcacttctctcttctccacctcagtctgatgagtgcaggcctcccgccctcacacacgctattccctctgcagggcttagctctcctccaggccagctgctgttgccctggtgcacggtagcctggagccctggctcggggctgggcagctccctcagtgacaccttccctcctgctacccctgactgcttgccgccttcctccactgggaggggtcccatgggactgtactgggagcttcttggagacttcagccctcgtccacggccccagcctcaggatcctgctcaggccctgctctgttcagggcaaagctggggcacctggctgctcaggaggactctgggctgtgcccttgtgggactcatggtctaggcgggagacagaccttccccaacagagatgacccaacaaaggcagggctggggagctcaggacagtgctgacccaccctagggtaccagtcaaggacttcttggcaggtggggccctagagctcagatgtggaggaagagggaggagctgggtgtgggcaggagcagagggtcctaggctgagggagagcctgaggggagggggccgtggcactcgagactggtgtgtggggctagcctggggccctcatctccactgggcacggccctggcttaccagctcccctttctcaggctggcagagaagaaggcttccatcggttatacctacgaggacagcacggtggccgaggtagagaaggcggcagaaaagccagaggaggaggagtcagcggccgaggaggagagcaactcggacgaagatgaggtcatccccgacatcggtggggtcccctctctgccctccccacctgcagtccctgggcatcgtttctgtgtctcgtccctcaccctctgtggggcaccccgtgcttacgaaccgtgtctctctccctaccccgccccagggcacaccagcctcctgctgcccctgtctcactcctgtcctcctccgttccggccttcctctgcctcactcatctctcatttctagggtgctatttctatgatcttttcccctcctaggtgttggctccattctcctccacttgggccggcctctctctgcctttgcccctctctcctgctctcttccctcctctggaaaacaagtgttcatcctcttacagagtcagcccccatccgccaggcatctgttcaccctcctctctgccattcacctcccctctggattcccactgatcaaaccacccccaagtctctctgtttttctcatcctggttcttactccagcaactggctctttttatttatttatttatttatttttgagatggagtcttgctctgttaccgggctggagtgcagtggcatgatcttggctcactgcaacctccacctcctgggttcaagtgattctcctgcctcagcttcccaagtagctgagactaaaggcacacgccaccacgcccagctaatttttgtacttttagtagagacgggggtt[131 bp omitted]tggagccacacattgacctccgcccagccctccttcctctggcttatcacacgccctgcttccaaacacctgtgacccacaccctgcctgccacccaccgtgatctccagccgccatctttccgcccctgttcagtcctccctctcacgtcaaccccaccacacgcctcactcatccattcctccctccctccatccacccatccctccttccttccttgcctccattccattcatccatccatccatccctgcatcccttcatccatccctgcacccatccgtccatctctcccttctctttccctccctccgttcatctgccccttcaagccctgtccccgagctgcctctgtccactgtgtgttgtgctcacctctggcaagcccagtgccagcctagggcatgccaagatgagccagacttgatgccatcccttcctgaagaatccctcagtctggcgggcgccccatcatccccgcctcctggagcactgccccttctcccctgtcctctcgctcggccgtggctcctgacagcctttctcttggtgcagacgtggaggtggacgtggatgaattgaaccaggagcaggtggcagatctcaacaaacaggccacgacttatggcatggccgacggtgacttcgtcaggtgaggcctgcctgctgacacccctacccattctgtgggccccaccctggcatctcactattactcccggtattgacagccatcctgtttgtgagcatttgtgtgcctggccctgggcccaggactttacacatgcaggtccctgagcctatggtggtcgtggccccacttcatctgtgcagaaacaggctgcacccaagtcacccagcctgccctacttagtgcgacctggggcgaatctgactcttcgaagctctggggattcctaggctgggggacagcgccctctagtggagaggcttcattccctggttatttatcctggcagttgctggttgtacctctaccctgagccacaccccctgctgagctcacaagaccacacagaatggtcccagctcactgggcagtgaaccagaaacggagcctgagcatggcaccctctgcccagagccctttgtggctcccacctccctcaggaacatccagtgtcctcaccatggccgaaaggtcttacccatctggtcctctcaaccgccaccatcccccgctgcccagcctgcacagtctccttgctcctcaagtgcagaggcctgggccagcccctgggccactctgtctgctgttcgctttggacgtctgcagcttgctcccccaggtttttctctagataccctgttttgtgtggcttccctgagctccctcttgaaaactgcagcttcctctgcctttgctctaccatctaatggaccacacattttattcccttgctcattatcttctcccctagaatgtaagcccgtgcaggtgaggatttctgtttttttttttcagtgctcagttcttgatacctaagatagcacctggcacacagagggtgcttgataagtggcattgaatgaaagatacctcaggctggcgtggggtgactcaggtccctcactttctctgatgactcagtctgtgtcctccttaccctgtggcctgccccatcctccaccctaattctcacccacctctataggatgctccggaaagacaaggaggaggcagaggccatcaagcatgccaaggctcttgaggaggagaaggccatgtactcggtgaggtctgggctggagtggaaggggacaggggtgtgtcacagggagggcaccccctcaccaacctggcacccaccctactccagggacgccgctctcgacgccagcggagagagtttcgggagaagcggctgaggggtcgcaagatcagcccacccaggtagggcttctccctgaacccccaccctgctggcatctgggggaggagagcaggggcttagggcctgagaaagctctttggaggcaggcatttgacttgagaaaggagtctttctagtggggcgatgcatggccatcgtgaaggtttagaggtaggaacggccttgagggccatgtggactcctttccttgccagcccctcccctcaccctactggactgggggcccttgccagactcccaggagcccatgcacaggcggcataaggctctcaccaaggcggcagagagggcacaggctttgccctggactctcacccagttctgctgcttggcttcttcctgtgtcggagtttggacaagtgacttcccgaactctctgagcttcaattttttcctttggaaaacaaggcattatcacctacctggagagagggctgggcagtccccacagggaggtcttgggacaggtttggatgaggcaggctggcttggagaggaaagcccagcctgggtcaggaggccttgaggagaggccctgtgcaaacccatgcctctttttgccacatctcttaaaggagagtgactgagagttcctgtaaggcttaaacaacttgtaggttcagcggttggtatcggaaacattccttaaagaatagcaccaatcgtcattgctgtcagcggtggcacagaggcacacagagggtagtgcaggaacgcccaggctgggtggccatagggcctgggtttggatcccagtttcctcctttatgagctacgtaatgctggacaagtgacttcacctctctgggcctcagtttcctcagctgtgatagtctctcttttttttttcttcccccagagacagggtcttattctgtcacccaggctggagtgcagtggtgtaatcacgactcactgcagcctcaaattcctaggcttaggcgatcctcctacctcagtctccttagtagctgagattactggtatgcgtcaccacgcccagctaattaaaataaaaaatacttagtagagatggggttttgcggtgttgcccagg[133 bp omitted]cccggacccagtgagagccagagacaaggattgggaggagggatgctttcattctagggtcaggaggccaagcagaaccagagctgctgaagtccaagttcctcagagtcatgatgggtctaggacattgtagggtggggcttaagttcatgctttggacagatctgaggtgggggtgggtggaggaattaaggggaggcccccaacctggtcagcagccccctcactgtgccaggtacctagctttgggtcctcaggttggcgggcttatcccaaattcatgactgctgagatcttaagccctaatttgtcccaccccattcttttctctgtagctatgcccgccgagacagccccacctatgacccctataagcggtaagttgctctggaggaccagggaatagcagacagggagcctcctgatggggacaggggtgctgaggaggggatgggaggttcaccctgctaggccaccccaagatcacagactgcatgatatgttctgggtctgaatcatttttgtgttttccagatcactgtcttgttttcccagttttaaataaaattttttttttgagacggagtctcgctatgtcgcccaggctggagtgcagtggcacgatcttggctcactacaagctccgcctcccaggttcacgccattctcctgcctcagcctcctgagtagctgggactacaggtgcccgccaccaggcctggctaattttttgtatttttagtagagtttagtagggtttcaccg[137 bp omitted]tttctgatttaaatacagtgcagccttgtggtaaaaatgaccaaatatggcaaaacagtgtgactgagaaatcaagtcactttaatctcaatttccagaagtggccagtgggaaataacgggcactcagtagcaccgctgggcacaggtcgttgtctcgtggatgaaagagtggttggagaagggattttgtgagggaccaagctcagtctgatcccagtccccctcatccaagctccatagctctctgaagcccagttccctcttcggaatgggggtgggaatgggatcttcctcatggggctgtgggtcgaggttagatgagataaggtgttgaatggcttctggggaaataaaaggtgtaggttagtgctccatacatgggagtgtcaggaatatcagatactttctttttatttttaaaattttatatattaaaaaacacgtttgttttttttttctttaaaatattgagatggggctcaccatgttgaccaggctggttttgaagttctggcctcaagcagtcctcccacctgggccttccaaagtgctgggattacaggcatgagccatcacacctggccactttgtttttattttactaaaatagaattgcaccacactcagtgttttagaacttgctttttcctcccagattatccatgtatcttttgagtaaaacttttctgtgttttgtacagagatctgcttatctttttttttttttttttttttttttttgagacggagtctcactctgttgcccaagctggtgtgcagtggcgtgacctggactcactgcaacctctgcctcccaggttcaagcagttctcgtgccctcagcctcctgagtagctggaattacaggtgcgcgccaccatgctcggcaaattttttttgtattttttgtagagacagggttttgccttgttggccaggctggtctcaaactcctggtctcaagtgatcggcctgcctcggcctcccacagtgctgggattacaggtgtgagccaccgcgcccggcctgctcatccatttttcatagccacataaaatcagagcagttgtgtgtcattgtccttcctggttatttagcgaaggctgcatggttgtgagtcaagtccttgtccagagctgggtctccactgccctccaggctccatccacccgcctggtttcccgggtcgctgtggcccgcgctggcgctgctgttgatctgctgtgtgtgctgttcccgaagaggctccgggagcctgagctagtgagcctcctcctccctacccgcaggtcaccctcggagtccagctcagagtcccgctcccgctcccgctccccgaccccgggccgcgaggagaagatcacgttcatcaccagttttgggggcagcgatgaggaggcagccgcagccgctgctgccgcagcagcatcaggagtcaccacagggaagccccccgcacctccccagcctggcggccccgccccgggacgtaatgccagcgcccggtcggtaacgctcacgccgcccgccctacgccccggtcaccatggggggtacccggggcagaggggggccgcggctcaggcctgcgctgaccggccctccgtgccccgcctgcagccgccgctcctcctcctcctcctcctcctcttctgcctcgaggacctccagctcccgctccagctctcgctccagctcccgctctcgccgtggtgggggctactaccgttccggccgccacgcccgctcccggtcccgctcctggtcccgctcccgctcccgctcccggcgctattcccggtcccgtagccgtggccggcggcactcaggtgggggctcccgagacggacaccggtactcccgctcgcccgcccggcgtggtggttacgggccccggcgcagaagcaggtgtgtgtggctgggcgtggaggtgggaggggctgggggggcgcggtctccgatcctggggagaaggtgctcagagggaggaaacctggccgtccagctcagagaacaccccatctaaggggacaggcacaggccactgctcttccgcaggaagcccttggttggaaagggcaaggcatgggtgtttgcgtgcgcgttctggtggcagtggaggtggatcccagccgctgttttccacgacagggtgtggagaggagactgtgcatctctctctcctcaggagactgtttttgctgtcaggggttccaggtggaggggagtagaaagcgcatggacgctccagggttttctgtagcttgaagggacgggtccgggccttgagggctgggaaaccccttgcggagggggaggggcgcgttcctgtgtggccaggagcggatggggaagcgaa[132 bp omitted]gaaaccccgtctctactgaaaaaaaaattagctgggtgtggtggcacacgcctgtagtcccagctacttgagaggctgaggcaggagaatcgcttgaaaccgggaagcagaggttgcaatgagctgaaatcgtgccaccgcactctagcctggtgacagagtgagattccgtctcaaaaaaaaaaaaaaaaaaaaaaattagctgggcgtggtggcacgcgcatgtagtcccagctatgcaggaggctgaggcacgagaatcgtttcagccccgcaggcggaggttgcagtgagccgagattgtgccactgcaccccagcttgggctacagagtgagactgcgtctcaagaaaaaaaaaaaaaaaagacatttcattttggagacgacatggtgagaggctagctctagggatggtttagaaaataaagtcacctggggactggtccacccccttccggtccccttgcctgttggggtcagggctgccctgggaagggcagcgacgctgggttggtaggagcatagactgcagggcacctgcctgagtgtagagtccctgggcctctaattctgtaaaatcgcggtaatagcatccgcttctctgagctgttagaggtgtaacaggtaaacccatgtaaggtgcttaggacagggctggtgctggctaagtgccgttaatatcgtcagcatcattacctgcgttattgtagcactgatcgccatgtcagctgccttcagggtctggcaggtaaagtagaggggccaggtagagatcctgctgacctggcaagcacatgttccctccagtcggggcgttgaccgctcagcagcaggtctagtgtcacccagtctttctagttctcaggagaagttgagggtctggatttttagaggatagctcttgtttcctttacttttttttttgagacagagtctcactgtgtcactcaggctggagtgcagtggcacaatctcggctcactgcacctcctcctcctgggttcaagtgattctcccgccgcagcctcccaagtagctgggattacaggcatgcgccaccacacctggctaatttttgtatttctagtagagacggggtttcactg[139 bp omitted]acgcaattcaaaaattagccgggtgtggttgtgcacatctgtaatcccagctattcaggaggctgaggcaggagaattgcttgaacccaggaggcagaggttgcag[132 bp omitted]tattccttgtagcttacccagagcaatgacaggagaaaggcttgggggacaggtgggacctgggcacatcttgcatgccagcctgagagtgggcagtgggtggagagtcccaccagtgtcctgagcagggagaggatggggttccgcatccccagactggaacttgtgggtctgtgctgagactggtggaggacaaggggtggtccccactattgtcgagaccctggacacaagcaggatgaggtggtgggtgagggtgtagatgaggtcaccgtggaacactgttgtgcctgagctggacacggctcataaagggggagccagccatccctcccagagctcacctcccgggaagttagcaagcgggtgtctagtgagggagaggtgacgtgggccaggcagggctcatgatggcaggactgcccttaggctgagtgtatctagagcgccatctctgtagccggagggaggccggaatgccgctctgggacattttggagggagagtagcaggagaggagagtcgagcctgtcaccctgggccttgcaggaaggaggactgtggatccggacccagggtggggtgcggttggggtccctggagcctcacagtcctcctcccgccctgctgcatccccaggagccgctcccactcaggggaccgctacaggcggggcggccggggcctcaggcaccacagcagtagccgcagccgcagcagctggtccctcagcccgtcccgcagtcgcagcctgactcgcagccgcagccatagccccagccccagccagagccgcagccgcagccgcagccgcagccagagcccctcgccatcacccgcaagagagaagctgaccaggccggccgcgtcccctgctgtgggcgagaagctgaaaaagtgagcggggcgggtctggaggaagagggctgccaatctcgggtggggagggtgaacatcactgttttctttttgaggggaacttagccctaccctgggaggtctggggggtggtgtatggccctggcctgggagggtggatttcagggggacacagccctggcctggggggtctgaggaggacacaccaaatcctggaggatctgcacaattagaaccttgtcctgggtgagggtcagagggggacaggtccctgtcttacaggttctgtggggtctgagagggacatggttgcaccctggggcatctgaggcccatgccttggctacctggtctgagggcagtgctgaggctggggtcagaggtggcagctgccctttccccctcccaaccatgtcctctggccctgcccccacccaggaccgaacctgccgctggtaaagagacaggagctgccaaagtcagtaagaatttggaactcgcccgtctaattcccgtcagcagcagtgcccaagagctgggcccggtgggcctgcaggggggcccgggtgggctgggagatccagccccagggacagggaggggaggggaagggtctgcccctgtgagaaccatgtccctctcccctcctcactgtacactggggctccacctgtcactgaacctctgggagcctcagggctgtccacagcctgcccctcctccccacgtcgttctcccccccccaccccccccccgcacaaagccccaggcttttggctgaggtgggttgtgggagctctgggacacccaccccctctcccgcctcttctcccccctccccagcccaagctgacgcctcaggagaagctgaaactgaggatgcagaaggcgctgaacaggcagtgtatgttctgccctgtccctccagggtttcacagctcttctttcccttggcagtgggagcaaggagactcagcaccactttgggaggcctggcccttccctagagaggccacgcaggcacggaggtgctctggggaggaatgggtttgcatcagctccgctgccgctatgctggggcctctgcagtcaggttgacctgtctgagctc[131 bp omitted]cgtctctctaaaactacaaaaaattagccaggcatgttggtgggcgcctgtagtcccagctactcaggaggctgagg[159 bp omitted]tctctctacagtcaaggcggataagaaggcggcacaagaaaagatgatccagcaggagcatgagcggcaggtgaagtgggaaagggagggctggggtgacgggtgggtgctggcctggccacgtcctcatagccctgtctgctgcaggagcgggaagacgagcttcgagccatggcccgcaagatccgcatgaagtaagaccttgcccctccctgtcccatggccacacctcctggcctgcctggccttcccaccatgggctgctggctcaagccctgcccagctccctgtgggtggatgaaaggcagagatccctgcctggccctcggggctgtgcccagctgcctctcttgctcctctccctgaatttcctcccaccatttcgacctgcctcccgccaccgcgacctcctcccagctcttccagcctccaagtgccagtcacctttgctgtttttttggcctggcaagctgttcctgataccccttccccactcacccaccgccatgggtctttctcctgtcccagcctcagtttgcttatctcctaaatggagatacagtcactgtcccacctcacaggctgttgggaggatttgacaagatcaaggccaggcacggaggaggcacccagtagacgtagccattgggttgccaagcctggccactgtgacggagaccatttcaacactcactgtgtgcaggtgccccagtgcggcaggaaatgatgggactatcctgcctccctctgttccccaggctttcctaggaaggggctgggattccagtcagccccgccagctggggtccctctgaacctggggctccctttccaagcggggattggtggcagtaccggcccccttggtttactgtcttcctcggagtagggtgttggaagcacctgccctccctgagttcagtgtgtccagtgttcccggccagatgctcatgccatgccttcgcagggagcgggaacgccgagagaaggagagagaagagtgggaacgccagtacagccggcagagccgctcaccctccccccgatacagtgagtgtccccaccaggctgcagggctctggggcttt[139 bp omitted]ccaacatggtgacacacatacgtacacacacacacacacagattgctttagtcacaaggtgattgcagcaattagaagtgctcattccggcatgggctggtgaggggcacagatggcagccactggactctctggaaatgtcccctcatttggagacaacccctgaagttcagttttgaggacctcaccccaggtcaaggaagaggccctggccctggatgtttgctcgctcttcacctgttgttttctttccaggtcgagaatacagctcttctcgaaggtaaggaagcccatgaccctccactttcttggaagtaacacttgtcctttgatgggaggtcctggctgtcattcctccagcctcaccctgtacccacctccagttggaggggctggtctcatcccttggggaacatccttccctccacagacaagtgccccgatcactgaagcatccacggccccaggtgtgttgatgtgtgtatgccccatcctcacggcccctccctttctctttccaggcgctcaaggtcccgatcccgaagcccccattaccgacattaggcagaagagtggggggtggggaggacaagggggtgggtaaggggctcaagctgtgatgctgctggttttatctctagtgaaataaagtcaaaagttatttaattcccgtcacctgtctcagtgtcatctgtgtggttggtgcagggctctcccaccccagggcccatgggccagcagagccagctgggagggcgcttgggtttacaggccagatgccagtgctgcctgtgtgggacatcttgcccccatctgatggctaagtggcaggcccctgttcatcagaacctgccatggctcagtgaggcctgctcaggaggccagggcacagtcccaagggagagggcccagacctgcccgcagatgtggacatagggtgtcggcccagcatgtcccacatgggcccctttgcccagggcctctggcgacaggtccgggcctctccccgccctcgcctcagcccctgccctggcctcgcccgcactaggaactgggagcgcagctttctgtgccagtcctgctgcgccccaggcactgggggctggccgttccctcaccccctcactccaaaccggtctgtccagccgtccaccccacggaggggaagcctcctgccccacctcatgcaccccaagaaagccagagtccagacgggtgtaaataaaagggaaaatttacttggagaaggcgggcaaaaacgaggaggtcaatgggtgttggcagcggtaccagggacagtgaggggggctttcctgggctcaggcctcgccggccgcctcagggtgcttctgccgcaggtgtttgtccagggtggctcgcaggccgaagggcacatggcagtgggggcactcgaagcgggtgctgccaggcgtcatgccgtgcatgcggcggtggcggttgagcttactgctctgggcgcaggcgtagttgcagaactcacaggtgtaggggcgctccccggtgtgtgagcgccggtgcaccgtcaggttgctgctgttggtaaaatgcttcccgcagaactcacagctgcccccgggcccgcggctcttgccccctgacttgggcatctttttgggtgatgccttctggctgtttgcagggtcagttctttgttccgtggtgatggctccccaagtgtctccaccagggccggcttgagccccactgccaggagccccgggttcctggacacctgctgtggcggcggctccagccccctcaccaccgctgcatggaagggtgctggtgggggcagcagcatggacagccggctccggaggggctgcagaggcctgctcctggctggtgtcggccatgagggggctctggggcggcacctgccggtgggtcttcttgtggcggttgagcttgctgctctgggcgcaggcgtagggacactggtcgcaagcatagggccgctcgcctgtgtgtgagcgcatgtgcactttgaggttgctgaaggagctgagggtcttcttgcacacaggacaggtggggctccgccgggtgaggccgctgccacttgcacgggggctcttggcctcagctgctggccccaccactgccgacacggctgcagccacctcggccaggcccaggagcggggcctccggggcctctgattctgtctggtagatggacagtccgtggtcccactgggcgtgacgcagcagcttccaggccactgtgaactgtttgccacagcgcaggcagctcaaggccttcagctcctctcgttctggtaagaaaaagaggcagagtgttagtgcggacagctgccagctggacaccttctgtgggataggcactcctgcaggggcaaaggacttggcagtaacaagacacacacaccctggaaggaccaggaagctgacgctcagaggaggggtggacacgaaaaatctgtggagtgggtgctaagtacctgaaaacatttttttttagacagtctcactgtcgcccaggctggggtgcagtggcacgatctcagctcactgcaacctccacctcctggattcaagctattctcatgcctcagcctctagagtagctgggattacaggcgcccgccaccatgcctggctaattagtagagatgggggtttcaccgtgttggccaggctggtctcgaactcttggcctcaagtgatccacccacctcggcctcccaaagtgctgggattataggcatgagccactgtgctgggccatgtgtttgaaaatcttttaaaaagttatgttaactcagtaagcgcttcctacatgctaggtgctgagccatggctcatagcccggctttccctcaggacaggaaaataagatctccattttccagacaggagaactgaggcacagagaggcatttccccagggttgcacagcttggaaggggtgaagctgggatttcaatccagactactgggggagggggagagggcagaacagaggcttgcttgcttttttttttttgctttaaatttttaatttagtattttttaaagagatggggtcctgctatgttgcccaggctatttttttttttttttgagacggagccttgctctgtcgcccaggctgcagtgcagtggcgcgatctcggctcactgcaagctctgcctccggggttcacgccattctcctgcctcagccaccacgccacagggtttcaccgtgttagccaggatggtcgcgatctcctgacctcatgatctgcccgcctcagcctcccaaagtgctgggattacaggtttgagccaccgcacccggccgcccaggctattctttaacttaatggcctcaagtaatccttccgcctcagcccctcaaagtgctgggattataggcgtgagccaccatacctggctgggagcagaggcttttgaataagatttttggtttaggccgggcacggtggctcacacctgtcatcccagcactttgggaggctgaggcgggttgatctcttgaggtcagggatttgagaccagcctggccaacatgatgaaaccctgtctctagtaaaaataaaaaatagccgggtgtggtggtgcgcgcctgtaatcccggccacttgggaggttaaggcaggagaatcgcttgaacccaggaggcggaggttgcagtgagccgagatcccaccactgcactccagcctgggtgacaaaagcgagactctgtttcaaaaaaaaaaattttttttggtttaataaaaataatttttaaagtaattgagatatctgggcatggtggctcatgcctgtaatcccagcacttcaggaggccaaggcaggtggaccacctgaggtcaggagtttgagacaccagcctggtcaacatggtgaaaccctgtctctaccaaaaatacaaaaattagctggccatggtggtgcacgcctgtagtcccagctacttggagggctgaggcaggagaatcacttgaacctgggaggcggaggttgcagtgagctgagattgcaccacagcactccagcctgggtgacagagtaagactccacctcaaaataatggggtagctacagagaaagcttagcggccacctagtaaagaggtggtagtgacctgggtcccccaccctctgcatggatctcaaattgagcccccaaacctgaatttggatttctatctggaccttcggggtactctcagtggacacttcctaggtgaactagcctttccatttttcaaattctagagtcttggatgggacaacctttgtgatacaaccagtcctgggtcaagagcacaggcctgcattcaaattcagacttctctgctccctaattgtgtgaccttgggcaagacatagtcctctgtgtgcctcagttgctagaattcagggaccctagagatcccctccctttcaagggtggttgtgacctcgcttggggaatggttgagagctttggtccacataagcgctcaaacagcagagcctgtgaaaccaaggtgcccatgattctccaagccctgtagtgttttgttccagcgattccatcacagcccctcgctcgctcctccaggccactctccatgctccagctctaaagctgattcaatcagtcacaagcccctcctctttcccaccaccagaccctccctggcccaaccctaaataattccacttctcaaaagtctcagaagggcaagggccagggggctggaaactaggtttggattaagccctgcagccaacactgaccaaaagctcaccgagggtcaagccccatgtgaaggcttttaattccctcccaagagaaggaacccgggtgtccagcacccgggagctcgctcaaaccaggggattcccagcacgcggggctgggagattccatcaccgagggaagccagaagccccttccttggctctgaacactcagctgtactagcacctcaatcagaattgacagagagagacaggagggggtggcaacctccccattccagctggcctccactccccctccccccggccgctgccctccctagaggtcccctcctactgccaccctggtccagccacctggccagttatttctggccaaggggaaggagaagtgaaaccaggttggggtgtgtgttggggggggcaaaatcccgggctagtcttctggggctggccacaccctgtaggcggccctccttccctgcccagtccccccccgccccccctccaccgccaccactggtccctgccctaggacgggcaggccctggccacgcctaggctgcacccgatggggagcgagaaaggggaagtagtgctcagtgccctgccgtccagcccagcccctttccagcaggaagcccagccctcgaacttgagagggggactgcacccggctttactcacctgagccctggccgcggctggggcctctgaagagctgacagcccagcttcttgtggtccatgaaggcagtgatggcctccaacgggaaggtctgcaggcagcggccgcaggtcaacagatctgggtgtttgtcggtccagggctggcggtctgcagggaggaagcgggtggtgagcgtggggtggggccaggatgggggctgagggtgctgaaggagaggggaaaccgaaggtcagaagggggcctgaggggcaggacggggcgaaggagataaggcagggcgaggggcccatgcccaaagggaagggtcccacccgagggtcaaaggtaagggaggctgggcccagggcccggggtgctcaccgggatagttcggggtcaacggcgtccacagggtccacgggttccgcgggccgagggcgaggagggcggccccggcgggcatggggccaggggagtggtggggttcgccgccgaaccgccccgccgaggacacctccttcggggagaagggccccagccttggggcctgttggggctgcgcgtctggctcgggcttgagttcgatgacgaggtcctgcatttccatctcgtcgtctgggttggcggcgggcgcgggctctactcggcggggcgcgctgccggccttgcggcgggacatgagtcgcgggccgggcgagcgagcgggcgggcaggcaggcaggcgggcgggcggaggacgcacgagcggaggacgcgcggaccgtgcgcgctcaggtgagtgactgcggcgacccgccgcgaactcttacacgtgctggccgggcccgtggctccgcctaccagggcggggctcatgggaggggaccgagccgccctgctggggccctgacggcggcctaactcaatctaggcagtgtcccgtgcgtttggcttagtgaccaaatttaatcacaccgagttcccacaaggcattgaaacagctatccctgatcccgttttagggcgggtgaaactgagacacggcatgcccacacgcacccccaagcgagaaaaatagtcggtcacgtttcttattaggtgcctgatagtaatctgggctatttcattaaatgcattacaataaaaattcattttgcaagcattcactgagtgcctcctgtgcgccaggctctgtttgaagccctgagaatacaggagggaataaacagaagataatctttgtttgcacggagttcagacggtgggggaagacactataaacataattacgtaaaatatagatggcccttcatgatgaccagtgccatggagcaaaagaaagctggaaaggcggagagggttactggggttgagggattcaattttctcccctatgatgggaaagggcatggtggagctgaggctggagggaaggaagcccagccagtgggcctgggcattgaggaattacaaggaaagggagaggcaatacgggttggggattgagttcagtgaaaatatgggggcagatccaagcaatcttttgatcgctttaaggtcttttggttttcctgagaccggagccttaggagggttttgagcagaggaggactgtaatcatacacatcgactctgttcctagaccagaagtcgccattaaaaccaaatagccaagcagctcacctgcctccactccgcctccttgaacttccctcccctaagcagttctgtctgctcactgtttgaagtggcatcgacaccctgccccaccctcaatccctgatgagtattcttttcttcctggcaccgactgcacgacagtatagaacggcttgtggactgtcctctcccccacccaatgcaagccccctgaggtcagggcaagaacctgtcctcccccagctgtcctcagcccagatgctgatttcagatgctgatctcttggagttctgcacattgttattcaggtctgggttccattgtcctcctgagagcagagggccctgaccaacagtatctaaagtagccccaccctgctgaaggccttgcaaattacactccatgacctccatctgtccccagttccctcttggatctcactttctccatctgtcaaaggaggtagggcaggttggaactagagggttatctgaggtggtttcttcttcactgccgcctcctctgatcaccctttttttttttgtaatttttaatttttcaaaaaaaattatttttaaatagagacagggactcgctttgttgccctggttggtctgaaactcttggcttgaagcgctcctcctgcttcagcatcccaaagtgctgagattacaggtgtgagacactgcactcagcctcagaccacccaattttaagttccatggcaacccagccacccactatcccattgcccttattttactctttttttttttttttttttttgagatggagtttcactcttgttgcccaggctggagtgcagtggcacgacctcagctcactgcaacctccgcctcccgggttcaagtgattctcctgcctgagcctccggagtagctgggattacagatgcccggctaatttttctatttttagtagagacagggtttcaccatgttggccaggctggtctcgaactcctgacctcaggtgatccacccgcctcagcctcccaaagtgctggaattacaggcgtgagccaccgtgcccggcctattttattctttatacatcactttgatcaaaccctgaaggatcttgtttacatatttgctcattttaccctattctgtcccttctacccccactagaacgtaggttctaggaggcaggatgggagtctgtcttgttcataaatacaacccctactcgttcatagttaagtcaacaaatatttattgcgcacctactatgtgtctgatgatattctttcaacagatatttgcagagcaccaaattgtgtacctggcactaggccttggtgatctagtggaaagcaaaggcccacaggatccctgcgtaaagaggaccccgcaaggagaaagtgaattctgactgggcctggaatagggaggttcatattccccattcaaggcctcagtttccccctttgtaaaatgggactgcagggagagctggaggacaaaatgaccgcctctgatccagcccagctactttcttagtatgcggcatctgaaaccatgatctccaggtttcctgtagaggagcgggggttcccactggaagcaaggggttaggagtgggtatgtgtagggggatggggatgcaaagaccgagctctgcccttaacccagcagggaggaagtcttcccctctctgaacctcagtttcttcctgcctaaaatgggcatcccagacgcccccaactcgcaggcaggaagatcggtcccaagtgccccgcaaagccgcgggccaggtggcgacccgggctgtgctggcttccaagcctgcgagccagcccgcgaccacgtggggcagtggcggcggcgcgggcggaacccaggctccgcggcttgcggcctgcccgggcctctgcagcgggggcgccggcggaagtggggacaccagtagccgcggacctcggtgagtacaaggtggtggggggtcgccagcaggttccctctccccggccccagctctggacgctcaccccagtgcaacgccctgagtgacggaaagaggtaggaccgcgcctgcagcgccggctggagggacgttctggtccccagacgctcctatcagggactgtttgatcccgatcgccggcagcgggaatgccccacgcgggtggggtgaggagaagggagaaggagaaaaacttcccctccggaaaataataaatggccacgataacagaagcatcggtggcagtcatcccgctttacctggagcggaatcgctcgctcagtctgagcctggaggtgggaagaaggtccagtccgaacgcccagggcggtgtggggagtggacgcctgggggccgggaggacctacttagtataagaaaaggagagcaatgggtggtcagggcggaattgaaaggaaactgaccggccccaggggagaaggggaggggagagattctgtgcttggggttctgaccctctcgggtggccccatttagctaatttgcatcaagattcagcagccgatgatgtctgtatgtgtgtgtgtgtctgtggacacgtcaacaccttggttaattaattaggtctggcggcttctctgttgacaactcagctggttccacaccctggcaattgtgaagagttggccaaatgtttgtccactgagctgatctcctctctggagcaccggggccaccaggagggaggtctgtgaaacccctgcccctgccattgacctaagtgttgggctcttgaatctaacagactagtttttcaagtcgtgggggatgggcttgggcatttttccctgaaaccttcggaaatccttgccttggagactgaaaggataaaggcctctggggccaggtcaccagggacaatggataacgcctgcctctaccctcctgggcacaccctgtgtgatctttcttaaaccagtttcttatcaggtcacaccttggctccacagtctgcctttctacatggggcacgggtgaggaccagagtttgctccctcttcctccaccctccagcttgcaccaaggaaatgatttttttttttttttttttgaaacagagtctcactctgtggcccaggctggggtgcagaggcgtgatctccgctcactgcaacctccgtctccctggttcaagggattctcctgcctcagcctcctgcgtagctgggattacagatgcgtgccaccacatccagctaattttttttgtatttttagtagagatagggtttcaccatgttagccaggctggtcttaaactcctgacatcaggtgatctgcctccctcagtctcccaaagtgctgggattacaggtgtgaaccactgcacccagcccgaggaaagatttgacctgccagcttcactggccactttacaaaaatggggattgcatcaatatgaccaaatctcccttgttttttgtttttttttttttttttcctgatggagaaaacaaggccctatactggccctcccttaatttcattttatccagggatttaacagaattctttggccactctaatcctatctaagtcatttagtaagtactcaccctagagactagggggtttctcttgaaactcaagtgttaatctaggctcaggaaagaccctgggggctggtgaggcctgactaaattggagtgacagtggtcagagaaaataaaaaatgcaagtagggcgtgttggcgtgggcctgtaatcccagcttctcggaaggctgaggtgggaggatatcttgagtccaggagttcaagattagcgtgggcaatacagcgagacctcacctcaaagtaaataaataagtaaatgtgctttttaaaaaattagaaaatgcaaggccgggcacggtggctcatgcctgtaatcccagcactttgggaggctgaagcaggcagatcaggagtttgagaccagcctggccaacgtggccaaaccgcgtctctactaaaaatacaaaattagccatgtgcagtggtgcgcgcctgtagtcctagttacttgggaggctgaggcaggagaattgcttgaacccgggaggcggaggttgcagtgagttgagatcatgccactgtactccagcctgggcgacaagagtgagactccgtcttaaaaaaaaaaaaaaaattagaaaatgcaactatcccttaattccattcacgtggtcttccctgtcaggaaaaaaaaaaaaaaccttggagtctcccttggctgctctttccctcaaattatatatcccttatcctgtccatcaccgagggctcttgacctttctttttttgtttgtttttgttgttttgagatggagtctcactctgtcatccatgctggaatgcaatggcacgatctccgctcacttcaacctccgcttcccgggttcaagcgattcttctgcctcagcctcccgagtagctgggattacaggcacgcaccaccacacccagctaacttttgtatttttagtagagagaggtttcaccatgttgaccaggctggtctcatcctgacctcaggcgatctacccacctcagccttcaaaagtgctgggattacaggcgtgacctactgcgcccagcctcgacctttcaaacatagcctaatctgaccacttctccccattcccattgtccccagcccatactagacgccatcttcttccacctggaccactacagtgacctcctcattgcgttcctagtgtctcccttcaatctcgtttattgtccatgcagcaggcagaggatcctgaggaccttaagccagattctgcccatccttcactcagaactgtccagtggcttcagtctcagagtagagacccaaattgtcatcacagcccacaaggcactctctctgtccctgcccccacctcctccacactggccttgctacgccccaaagccaccctttccatgatctttgcattttgctcttccttctgactggaatctccacatggctccattcctaatttcattcaggtctatgctcaaacgtaatcttatcatagggatctttcctgggctcccttgaaactaccctctatcccccaggctgggtcaggtgtctcctctggactccttcattccagccctactcactttgggtcatcactgcctaaggacaggtctgtgtcccctattggactgtgagcccacaaaggcggaactgggctctcagtcctagacgtgtttccaagaccgcccaatgtgggtcatgcacagagcaggcactcagatgatgtgctaacaatgctagataatgtggatgagtgaatttttttttttttgagacagggtctcatactctgtcacccaggctggagtacagtggcacagttatggctcactgcagcctccacctaccaggctcaagcgatcccctcacctcggtctccttagtagctgggactctagtcgcacactacccatgcccagctaatttttttttttttttgtagagatggggttttgctatattgctcaggctggtcttgaactcctacgctaaagcaattctccagcctcagtctcccaaggtgctgggattatagttgtgagccaccgcacctggctagaaaacttttctttggtgcataaaaatgatataaaattcaaatttcagtgtcccagtaagtaaggttttgttggagaacagccatgttcatttgtttccatattgtctatggctgctgttgtgctactgtggcagagttgagcagtgacagtaaaatacttacagagaaggttcgcagacctctgctacgtattttgccaagaagaaaaataaaataaagttaaaattgaaaatatgttgcccgctgggcgcggtagctcacgcctgtaatcccggcactttgggaagctgaactgggggtgggtcacctgagaccaggagatgtagaccagcctggccaacatggtgaaaccctgtctctactaaaatacaaaaattagccaggcatggtggcgcgcacctgtaatcccagctactcaggaggctgaggcaggagaattgcttgaacccaggaggcagaggttgcaatgagccaagattgcaccactgcactccagcctgggggatagagtgagactccatccccaaaacaattttgccaaggaggattctatttgggccacctatgggcatgtgagatcagtaagatttggcagctaattatgcagagtgggtgatgaggtttagatgcctcccagggagagctctttttcacattttcttttccaattcttcttctttttttttttttttttgtttgagacagggtctcactcttcccaggctggagtgcagtggtgcaatcacatctcactgcagcctcagcctcctccggctcactagatcttcccacctcagcctcctgagtagctgggactacaggagcgcaccctttgcccagctaatttttctatttttctggagacgagattttgctatgttgcccaagctggtctcaaattcctgggctcaagtgatccacctgcctcagcctcccaaagttctggaattacaggtgtgagccacctcgtgcccagctgcttcttgctttctgaaattaaaatttaggccgggcacggtggctcacgcctgtaatactagcactttgggaggccaaggcgggtggatcacctgaggtaaggagttcaagaccagcctggccaacatggggaaaccccgtctctactgaaaataaaaatatcagctgggcgtggtcgcgggcacctgtaatcccagctacttgggaggctgagtgacgagaatcgcttgaacccgggaggcggacgttgtagtgagccaagatcgcgccactgcactcctgcctgggcgacaagagcgagactccatctcacaaaaaaaaaaaaaaaaaaaagaaattaaaatttagtggctgggcatggtggcttagacctgtaatcccagcactttgggaggctgaggcaagaggatcacttgagcccaggttggagaccagcctgggcaatatagtgcgacttcatctctataaaataaaataaaattaattaattaaaaattttatttatttatttatttattttgagacagagtctcgctgtgttgtccaggctggagtgcagtggcatgacctcagctcactgcagcctctggctcacgggttcaagcgattcttatgcctcagcctcctgagtagttgggattacaggtgtgtgccaccatgcctggctaatttttggggcgtttgtttgtttttgagatggagtcccagtctgtcacccagactggagtgcagtggcacaatatctcagctcactgcaacctctgcctcccgggttcaagagagtctcctgcctcagcctcctgagtaggcgggattacaggagcctgccaccatgcccagcccagctaattttatttatttatttattttttgagacagagtttcactcttgttgcctaggctggagcgcaatggcgcagtctcggctcaccacaacctctgcctcctgagttcaagtgattctcctgcttcagccttccaagtagctgggattacaggcatgcaccaccactaattacagaaatgcaccatcaggctaattttgtatttttagtagaggcagggtctctccatgttggtcaggctggtctcgaactcctgacctcaggtgatccgcccacctcggcctctcaaagtgctggaattacaggcgtgagccacagtgcccggccaacacccggctaatttttgtatttcttagtacagacagggtttcaccgtgttgaccaggttggtctcaaactcctgacctcaggtgatccgcctgcctcggcctcccaaagttctgggtttacaggcgggagccactgtgcccagcctatgttcatgtcttctatagccatctttattccttcctccctctttgtgacctgtttgtctgcatcagtgtttcatttggggccatcaggagacgtttggcaattcatggagactttaaaaaaaaactgtattgagatgcaattcacattcaccaattcactgttcaccagtggtgacatttttggctgtcacaacttgaagatgggatgctactggcatctattaataggaggcagaggctaggatgctgctcaaaccctacacctatgcgttggacagcccccacaacatagcagataattatccagccccaaatgtcaatagtgtccagactgagtagccctggttcacatccttggtctatctgcagggtcctgtcttgcaaggggctcacagttcaggtgcagagacaggaagagcctaataagaaaaaggacaagttagtccaggcacagtggctcacgcctgtaatcccaccactttgggaggctga[266 bp omitted]gcctcagcctcccgagtagctgggactacaggcgactgccac[138 bp omitted]cccggccacacaagaatctcttgaacctgggaggcggaggttgcagtgagccgaggtggcaccactgcactccggcctgggtgacagagtgagactctgtctccaaaaaaggaaaaaaaagaaacaggacaatttcaatcacctcccttctgtgcctggccccagggtcttgggtacccaacacttgtcactcagctcagttagtcctcactaggtttagagaggagaggaccaagccacagggagtggtgcagctgctaaaacctaggtcctcctctctcaggtctgcacccacaaggccagcatttccctatacacattcaacatcatagcatagcgcttcatatgtcccagacatgtgccaaacatggtaggttagttaggtaatttagtccccatgcccgccctgtgagttagggctctgttttacagatggggaaacagaggcacagattagtcaagccatttaccccaggtcacacagcaatactaacaataagagcagttcactattatggagaacctagaatgtgccaggccctgtctggcaggagcctgttgaatcctgataacagcataggcagcaattggggctatttttccatacaatggaagagaaaactgtctcttactgatgtcacacagctaaaccggcctgggatctccac[131 bp omitted]gcctcagcctcatgagtagctgggattacaggcacgtgccaccatgcccagctaatttttgtattcttagtagagacggggtttcacc[140 bp omitted]aggctggagtacagtggcacaatctctgctcactgcaacctctgcctcccaggttcaagtgattctcatgcctcaggctccccaagtagctgggattacaggcacgcaccaccacgtccggctgatttttgtattttagtacagacggggttttactatgttggccaggctgctctcgaactcctgacctctagtgatcctccagcctcagcccctaaagtgctaggattataggcatgcgccgccatgcccagctcattcatgaattctcattggtctctatggcaggcagtttctgggggctggagatccagcagtgggaaaagcaaggtggccaccttgaaactcacggagggaaaggagatacaggcagatacagggaaccgaaagtgcaagagcccaagaagggattgccaggcatcgcgcctgaggatcagcgaggaggcctgtgtggctggggtggggagagcaagcgtggtacaccacgagggtgccggcaggatccagagctaagacagaagccacaagagggctccgagcagaggagggatatgatctgactcaggcattaacagggtgttggggtgcagacggcggggggtgaaggtggaagccagggacccagtgaggagttgactacagtactccaggcaggaagtgtctgtggctgcagcaggatgctggcagtggaggaggtgagaagtgt[133 bp omitted]acctctgcttcccaagttcaagtgactctcctgcctcggcctcctgagtagctgggattacaggtgcccgccacgatgcttggctaatttttgtatttttcgtagagacggggtttca[131 bp omitted]gtcttttatgactttaatatttttgaagagcccaggttagttgtgctgtttttgtttttgttttttctaagacaaagtctcactcttgcccaggcgtggagtgcagtggcgcgatcatagctcactgcagcttcaaccttccagggctccagtgattctcttacctcagtcttctgagtagctgggacttccacgagtacattgtcaagcctggctaatgttttttatttttagtagagacgaggtcttaccatgttgcccaggctgctcttgaactcctgaacgcaagcaatcctctcaccttggcctcctgaggtgctgggattataggcatgagccaccatgcctatccctgttgtccttgtttggcccagaggctggaagatcacttgaggccagaagttcaagaccagcctcggcaacatagtgagaccctgtctctttaaaatttaaaaaaaaaagaaaaggaatagcacagaagtggtgccctgccttcttagtgtcccattcctggagatgttggctttgatcactaagttaagggggtgcataccaggttcctccagtataaatttgtgtttgccctttacagtgaatgaatatcttataagtctgttaagactatgtagataccttatacttcatcaaactcccatccatgcttttttttttttttcttttttttgacacagagtctcactctgtcgcccaggctagagtgctgtggtgcgatctctgctcactgcagcctccgccttttgggttcaaatgattctcctgccttaacctcccgagtagctgggactacaggcgcatgacaccacacccggctaatttttgtatttttggtagaggcggggtttcgccatgttgaccaggctggtctcgaattcctgacctcaagtgattcgcccaccttggcctcccaaagtgttgggattacaggtgtgagccaccgcacccggccctatccacacatttttgcatctattccttttatatttatttacttgccagtctacagtaaggattatattttccttctcttccttatttattcatttatttattattggtatggattctggatttctgttttatccagtgggttataatctgtaactatcattattgtattgttcaaataattccagatttggccactgggagccctttcaagctagctcatgtgtgagtgggaatctatctagaagatagaatttcctgatggattgggtgggttgtgtgtgagagaaagctggggtttattcttttttttagagacagtgtctcactctgtcacccaagctggagtgcagttgcacaattacagctcactgcagcctccatctcctgggctcaactaatccttctccctcagcctcctgagtagcccagctaatgtaaaatatatatatatatttttagaaatggggtctcgctatattgcccaggctggtctcaaactcccagcttcaaagtgatcctcctgccttggcctcccaaagggctgggattacaggcatgagccaccatgcctggccaggttcatcttttggcaaatatttattgcctataagttgagataaaaacattataaaagcagacaaaggtccttgccttcacggggctcatgtttttgtgcatgtgacacttttgtttctgatccaagccattgggggacgatggcacagattttaggagggtggatcagtctggggcaggtgcagtggagctgcctggtagaccagcctctgcttccactcctccctcctccattagccccatgcttaccatgtaatgacttcctgctctttttcttcactcaacagccaagacaatgcaaactccagtgaacattcccgtgcctgtgctccggctgccccggggccctgatggcttcagccgtggctttgcccctgatggacgcagagcccccttgaggccagaggttcctgaaatccaggagtgtcccatagctcaagaatccctggaatcccaggagcagcgggcacgagccgcccttcgggagcgttacctccgcagcctgctggccatggtgggtcatcaggtgagcttcacgttgcacgagggtgtgcgtgtggccgcccactttggagccaccgacctggatgtggccaacttctacgtgtcacagctgcagactcccataggtgtgcaagcagaggcgctgctccgatgtagtgacattatttcatataccttcaagccataaagatattgtgttcacttttctgcttgaggctaaggcactgtatcccaggcctcccaatgttcccgagccaggaactctgggccccatggagttatgagctcccttggaattttgagccaagctttaagcaagtctggactcctgagacctcctgggtctagtcagtaaaattctgcaactctaggaattctaagatcccattggaaggaatgctctacctcacagaactctgaaccctacagaaatatgggcctgctgccatttcctgaagaccggggcatcggggtggggtgataaaggatacaacctgcacagggggaagttattaaagaggctgcaaagtccagccaccctgaagatactccccagtgctcccctcctgctaaagaaccagttaccccaggaaaattcgactcctgtttttctttaattaactataccgacggggatggagtcatctttaggggctggtagggtggttatccaagggctgaatccagtggagctgggccaagtacgacaggagtccagataaaggtgtaggggctgcacggccgcaagtctcctggaaaggctggagtgaccggcatgccgggattgggagattaggatttgatttcattttggggcgggcggtggctcgtgctgggtcacgtggtcgtgcccaagcgctcctcctgttgccccacctgtggttgctgtggactgcacacgacagcagattcgctgtcccctcgttggaggcgaatggtcggaccccgagtggcggcgcccctgataaaaggccgaggattcgcgatcagggtgcaacttcactccctcctcttttctctccagccttgcagcgtggccgttcacatcacgcgcttcactaagcctcctatcactagtaacctttcagcgcattgtttaaaaagaaagcagtttctgtccctttctgtagttcctttaagttcaggatgtaagcgaagccttccattaagtaaaggtgagtgtcgtttcgtctcagtcgcgaaagtgcggcggccgatgatgaaccgcgccaggagcagcctcagcggccatcagtccattcgcagcgccggctccgccgaggcccggacttagctctcgagttgccttggcgacgacgcagctcgctccgccccagttcccttttatggtttcagccccgcctcctctagttagccgggtgcgcttcggcaagcgtggcgaaagtgcggcggcgaatgtcaagcgttgggtctgagcctaggggtgtggcttgagctcacgctggttctttcttgcctcggtgatccaccagccttgtcacccaggatttaggttggcagattcgtctctcgcctttggaatttctaccttctcctaggttttgttttttaaaatcaggcctatgataccgctcatgggctcatatttattttagcattgtaatttaagttgtattttatgcaactctaccccgatacagagagctgttgatgtaactgcagcgagcaaatggaggactagagactagcgaaggggccgagacttcgtctccagagtatccctgtcagcatccatcaactgcactcatatattgaatgcagctcctatccgcctttcttttcgacttcttcatgccgttaccactcttcatcagttagtctagcctcaatgttttcatttatttcctttgttttttttgggggggggggaacggagtcttgctctgtcgcccaggctggagtgcagtggcacgatctcggctcactaaaagctccgcctcccgggttcacaccattctcgtgcctc[224 bp omitted]caggtcggagtgcaggggcgcgatcatagctcagtgcagcctcaacctaccgggctcaagcgatcttcccacctcccaagtagctggaactacaggctcctgtaaccagaccctgctaatttttaaattttttgtaaagacggggccttgctatgttgcccaggctggtctcgaactcctggactcaagcgatcttcccgcctcagccttccaaagtgctgggattataggcgtgtgccgccgcgccccgccaggtgttttcagttctatgcactccattccctgggctcttgacgaatgtgcgggagctgaatattcgttatttggactccggcaggaaggcgtgggctcagcttcgcgcttgcgcgctgctcttggagacggcgtctacttcgccccgcccctcatagtctgcagttccggctctgcagattcgctgctcacgtttcttttttccgtggcccttcctgccctttgtttctctcttcatgtcacccgcgggacaactctacgtgcaagtcgctgaaatcgattttctgcttcttatagtaagcggcgggctcgccagcctcgagcgaaagtgtgactgcgaacgggcaggcgcgcgcggggctcggcggaggcgcgcttgggctcccggcggcgacgactacgaccactaggagagcggacggaggcggcgcctgaagcggcggcggagcccatgccccgggacggcgggcggacccggagagacaaatccggggcccggggcatgtccccggggcccccgtgaggaggcggcggcggctatggagatcgcgccgcaggaggcgccgcccgtgccgggcgcggacggcgacattgaagaggccccagctgaggccgggtctcccagccccgcgtcgccccccgccgatgggcgcctcaaggctgcagccaagcgcgtcacattcccgtccgacgaggatatcgtgtctggagcagtggagcccaaagacccctggagacatggtagctaccgcgggtgaagcgggggcgggctcgagagggacccgggagtcgggagggatcggtgcagggcccggctcgaggtggcgttcaatagattgcacctaatggtgaataaggggacagtcgtcagtttagaaccgtagtctgttagaaagggggtggctatggagttgggaaggtgaaaagtatctggtttctgccgcaccccacccacccgagacaaagatggtgatcgttttagggtttaaaacgatgagcaattaaagaaagtttggtgttttgtcagatgtagagtgtggcagcctttgcgttcgtagttccaccagagaaggagagaaggagcagttgagaggaggagcgggtcaacactgggcctgaaagggcagttgaaagagtttgatgggtctatgggggtaaaaagaggttaagttgctggtctgcaagccttggggcaaggagtggtcgtgttggccactttcttggctggaaagagggagactataaacttggactgtggctatagaggacttggtaaaaaggagtcaagataaggtcccagaagaggagcagaggtggtggtcaatttgtggttgggtgagggagaaagaggcagtgtggtttttatgttttcttttttattgagacaaggtctcactacattgcccaggctggtctcggacttctgggttcaagctgtcctccctccttggcctcccagagtgttgggattacaggtgtgagccaccgccgcctgctgcaatgtggtattaagaagaaaagccaacgcctaccgccgcctcctcctccaaaaaaaagagaagcagaaggaaggctgtcagtcattcaggagcagaggatgtttgggacatggctacggaagggtcctcttgttccttcctgagaaagaattgggggatggccgggtgcattggctcaggcgtgtaatcccagcactttgggaggccaaggtgggtggatcacctgaggtcaggagtttaaaaccagcctggccaacatggggaaaccccgtctctactaaaaatacagaaattggccgggcatagtggtgcacacctgtaatcccatctactcaagaggctgaggcagggagaatcgtttgaacccgggaggtggaggttgcagtgagctaagatcacgacattgtactccagcctgggtgacaagagcaaaactccggctcaaagaaaaaaaaaaaaagaattgggggatgttatcaagtcagaaattggagttgctggccagtagcaggtgagagagatgaaaaagttggctacttgaagtgttgggagagagggccagcgcactggagagggtcaggtcagtgttggagctgaaaggagtgtgttggagccatagggctgggaaagtggaaagtcgcttgggacatgcagggcagtgttgagtccattttgtgctggagaagtctgtcagttctcctggggtggagcccatgaagtgagggatcagactggctgtggtggccgtggttctgtagaagctgatctgccggccctgggcaaggggagaaactattgccagtctgtggacaatggaggaattggtggctttgatgtgagggtgggaaacatggtaactggaaactgaacacacagggagtccatcatgaatgacagtttggctacttattataattttttagacggagtctccctctgtcgcccaggccaattctcctgcctcagcctcctcagtatctgggattacaggcacctgtcatcacacctggctaaaaatgtttgtatttttagtagagttgggggtttcaccatgttggccaggctggtctcgaactcccgacctcaggtgatctgcccacttaagccttccaaagtgctgggattaccggcatgagccaccgtgcccggctggctagttattcttaaagaggcagtggttaaattaagacttttgggccggacgccatggttcatgcctgcaaccccagcactttgtcaggccaaggtgggcagatcacctgagcccaggagttcaagaccagcttgggcaacaaggtgaaaccgcgtctctgcaaaatatacgaaaattagccaggtgtggtggtgcacgcctgtagtcccagcaactcaggaggctgaagtgggaggatcatttgagcccaggaggtcgatagtgcagtgaactgtgattgcgccactgaactccagcttgggtgacagagacccggtcttaaaaaaaaaaaaaaaaaaaagagttttggcactaggagccagccaagtccttgggctctaggccccagggataggtggttagtttgggacccgggcacagtcagaatgccccctggctattgcgtgatatccagtccagagcaggaaggggaaagacctggagaggcagagcagggtgtttcaagagcagaggctccaggtcagatcctttgagacctcgggctggttacctaactcctgagcctcagtcttcccatctgtgaagtaggtggcaatactcttgccacggaatttaggagaggactggatgaagtcacatatggaaaggaattggccagggtgagtgttctcgatggcagtcattgttattaagacagtgttggtcatcttgggctggtgtggaggagttcatgcatggggtggggcctggatgtggctgcttcagaggcttccaggagaggggagagatggcagtcaatgcgtgggcctggagtgaggtgcgagggggaagatggtcagtttgtgggctgaagggtcaggggtgagggcagcaagagagtctggcacagattgggctttggggggtaaagtttctggtctgcagattcccagaacaggtttggctttcattcagtaagccacttttcctctccaagcctctgtttctttctctgcaaatggaggtgctaatttttaccatggggtagttgtgaagatgaagtaagatagtcctcataaatttctgccacataaatagcagctgtcatccaggcagatttgttttttgtttgtttgtttgttttcacgtgcagtcttgaagaggcagtgaaagaactggagaggcagaaggctatctgtcaagaaaagaggggcagttggagcctggctgggaggagtttagaggaggggtgccggttggtctgtcctgggtaaggggtagagtgggtaacactctccaggctgggggagtctctcattccagcggttgagagaggggcagtaaggtctggttgggactcacactctcgaggagtccgtgcgtctgagctgcagaggtgatgacatggactggactggaagaattggtccatcctgtttgggaagagggcttgaggagttggcttggcagtgaggagttggatgatcttgggcctgggcaggggaggggtcattggtgaagttggtgagtttggacaaagggatttgcaggacagaaaacccaagggcctgggaacagcaaggagcaggggttaggctccatgctggggaggacgatggagtggttcactggccatggggctgtgggaggtggagggttcgccagggtgaagaggaatcgtggtacagaaagtgggtctaaggggaggcccaagtgagaggcccagagggtctggggctggaggactgcagggaggggttgcttggtcttggaacagaggtaggagatttgttggcatcaatctcataagctgtggggagggacagggggtgtcatttgagctgtggatctagtggaagggtggcgtgaccccaaggccaaggggtaacagaagagctgacaggtctgaaggggggagactcagttatccggaagctgttgtgccgtgctagagatggagcgctgcctaggccaggggatggaggagcgcccctgggtgaggaggaagcagcactgggggcaccccagtgcaggggtctccttcagcagagcctcacccctggggctacagtggtggcccagctgggtgggagctgtggggggtgtctacctgagggtgagcgctccctcaggccctgcaggggcccagggtttggggattcctggagatgaggtgatctggaggagggggattgtgagggagggtctcgagcctgcccaggcttatccggattcccatctcccacagtggggttccgcctgctggggctgctgtttcctcattacgtgaatggccatctgatgttcttctgttgtgtgcttgttttcttggtggtggtctctctcccgcgctggaatgggagagcagaggccgaagtccatcctcttctccgctttcctcaaggacactcagttgttgaatgagcgcctgtgggcccgtgaggcctggtggtgtctgagagccacctagcagagtgacatgtagctgaatgtcaggggcctgagcagcctggcgtggggatgccagtggggcagcagtgtgctctgtggcctctggcaagcatgggttcttgcagagcattgtgtttcctcacctgtgaaacagggccagtgatccctgccctgcagaccaccaggatgtcagaggatagggtgaacctgctgggggcaggtctcctcagcaagccacagccaggtgtgtgtagatgggcagggaagctcggggaggaggcaggctgggaatcgtgagtgaaagaggccgcttcagcactgccaggctgggcacgtgggtgcccgtggggagcgagctagccggctgcactgcaccccatcatgttgtggcagacccttcagctcttctgaaggccaaggccagacttacacaaggaacccatcaggccaaactgcaggaatgacctgaggctcggctggtctcctcagtcccagctgaactctgtggggttggaaagataggcatgtgagagggacttgtgatgagagcacatgacaccagccacagtccgggagactcatctcccctcctccagtcctgccggtgactcactccctgctccctgaccatcagtcctccagtgtgtgtgcgttgggggtttgcccactaggaagctacttgcatgaagtcaaggtgtctgcagggcagggtgagggggcccaagcatgctaccatctctggccacctgagctttggaaggcagcgggaggggtgggggcagggtgttcttaaatgcggatcttagggcatggaaatgccatactgttggctattgaaacccgtgctgcagattcagtcctaaaagcaggctggacaggtagacatgcatctgtcagtggtggaaagaggccccaggttagagaatcggcttgcttcagcattcgtggtggagctgctggggagtagggaacagggtcgaggcgggtgctttgatgcatctgctcagatttccgtctgggcccagctccacctcctgctgctggagttggcaagtagaccctgccactgagcagccacgtgactttggcgattgttctctctgcctcgatttttctgtgtctaaaatgcagcagtatgtcctcatagggtgattgggaggattaagtgagataacacagtgcctgatccatagtaaatgcccagcaaatgcctcccttgttattcctgtcatcaccactcctctgcccccacctatagccctaacattttgtttctgtttcctgcccgtgttgtgtatttgtactcctctttcccctatagtgtcccacgtcagcgtccctgctttccctcagaggcccactcctccaggctgggtgccccagcagtccctgacctccaggcctgactctgtctctgccaagctgtgtgaccgtggacaatttgtccaatctctctgagctaaaactaaatcagcctgtctcagcccactagtagaagaggcagcaggggtaccaagattccacactggccatgttagttccagcttctgcctactctggctgatgactttggacaagttgcagctcctccctgagcctgagtctcctctggagcgggggctccaccaccccagccccctgccctgttggagcatgatcaggttagtggtggtattgtgctggtgcctgtcctctgccctcccaggccctttgcacactgtgactcgccgctctccgtgcctgtacatgcagttgggccgcctgattctttgtgcctgtgattatctgtgctcgcatctatttcccccttcaagggcaaagactgtgtatgagtcacctctgtgaccctagtctagcacacaggagggctcgggcacgggacacatgtccgaaggactggggtgttttcctgggatcaaacaccccatggtgggatttacaggaaactttttttgtggtagttaatccagttggtgccaggacgaggactctttctcagggacctacagacaggctttagcacccattctgactcccggaagagcacgcgaagctggcccccagctggcactcggtaaccagccttcagtgcgtcagcgggagtgcgtgtgcacttgtttctgggagcgagtactggggctctgcgaaccttcacaggcatccgactccaagaggattaagaaccgtggggccaaatgccctgtgttggacggactgcagctggagcagtcactgagcacggaggccagaaacctgtttttacaaaagctccccaggtggttctgacaacctcgcttggctgtctgtgtgctttgctccgccatccatcactcagtcccaagcctgccttcagacctcagttcaggggtggctggcattgacctcaaagccttttttggagcaaattaacaggtgagcattgaaatactgcagaaattcaagctgagccggccacctgctgcagtagggcatgggggcaggtgggttaaattcttgccttctggctgaccttagtcatcaccagtcattgccttccatgtgcctgtaccaggcactggtctcagtgccttttgtgtattatcgcatttagatatcacagccaccccaggaggtaggtgccgtttgccccaatttgtagatgaggaaatggagcccatagaggtaaagtaattttcctgaggtcacacagtgggtaagtggtggagctgggattcaaatccaggcagccagcctggcgccgaagcctgcgcagtaataacccctgtgcggcggctgagtgcttggacgcattcggtgcaacgtgccatacggtctcttcatctataacccagaatcgtttataaaatagaggcaacagtgctggctttgcggtgttgtggcagggaggagaaacagaaacaggtggggtaagggcccagccttggtgggcacgcaggagggggtcactgtggttcgtggacagcttgagtccctggagatttgtgctgctcctctgtcctcagcattgcctgctgttctgacccttggcctctgggacgtgttcttcctgtgctactcagtgtctggtatgtgataggcgctcaatatattcttgctgcgtgagtgacttggtgaccccgtaaccagtcatgcattcagcatggtgtggccgtgccacgtgttacgagtcagggcagaagacaggcccagtccatgcttctgtgggggtcacagtcaagtgagggagacacacagtaaagaattctcagcaaaccaggcttctgaggactcagattagggagggtccacagggtgtgcaggagggcagggcagaggcagcttcctagaaaggacgtcaccaaggaaatccagcagtaagccaggtgaggagcagtgggaggagtgcaccaggggtggaaggcagagagaaccagcctggtatgtctgaagaacagaaaaaagccagacttagttgaggtagaggcaggctggtcagaggtgaggctggaggaggcaggagagactgctgtgtggggccttatgggctgtgctagcagggagccccagagggcttaagaaggggcctgggctgggcatggggggctcacgcctgtcatcccagcacttcaggagctccaggcgggaagatcacttaagcccaggagtttaagaccagccttggcaacatgacgagaccttgtctctacaaaaaatacaaaaatcagccgggcatggtggcatgtgcctatagtcccagctactcaggaggctgaggtggaaggatcacttgagtccaggaggtcgaggctttagtgagctgtgatcacaccactgccctccagcctatgtgacagagtgagaccctgtctcaaaagaaaaaggaggggcatggtgggtgtttttaacagaatcctgtgtggaggtgacatgaatagggtgagactgagacagggaggccagggaggggccgtgagccaggagcccggaggctgtaggcttggcgtagcctcatattggctgatagctgacacttgacttcattgacttcttcatcagattcctctgagtcctcccctccaccagcaggtttgccgatgccactgtttcccatagcacctctgaggtgactgttattccccttcccttctctccttggatctgagtcccttccctcgtgctcccccagccagcgtgtccttggcctgcttgggacatcctgcccctgcatgggctgtgggaggcgtgtgggctgtgaagtccggtgacctctccagtgacttcacctccacagtcccttcaggtctcacagtacccagatccagaaaactctacagaccatcccaaacccctctggtggcttagcgcaatatcggtgtctgatcagtcttataaaatccagaaaattctgattctaaaacacgtctggcccaagggttccaggaggagactctggagcccgcagcgggcctcgttccatgtttgtgaaatggcagtaacctgagaggcagcacgggagccccctgggtgccagtcccagctctgcccttgggcaaatcacccagcttctttgcctcagtgtccccatttgtatggggattgaggattaaattagcctctacttggaaagcagctggaacagtagctggctgttgcaggcgctcatgaggacatgggaaagttgagtgaggtggtcactgccttgaacttgactggttcctgcctcccccggctgtaagggttaggcaggtggggctagatgaccagcgggtaggatcatctgcctgagtgtgatttcggctcctccacacttgggctgtgtggccttgggcaagtcccttgacctccctggaccactttccccatttgtgaagccattttgccagatgaggactctctcaaagtttttagactctctgggaagaccagagagccaggcctggggcccacgccagcaggagcacaccctgcatcaagtgtggagctgatgccgctcctgttacatagccgccacagcacctccagggctgagcccacgtcaggctcctgggctggagccacacaggaggctggggtctgctgtttcagctaagaggaggtgggagatgtggaggggcttccctaattgcaagaaggtggttcagaggctgggtgccaaaaggaattcgagagatccgtcatgcttggctatgtttcgtacattaagtaggaaggtccatgaaggcaggacccatctttgtcttggctcacctgtgtccccagcaccctccatggtgcctggccctccgcagggtctcacactggatgaattggtggtggatggaggtacacagtaggcactcagaagttgttctcaccccttcccttcctctaggcagctggtactgagcggttgcctcaaggtgggggtggaggtttggaagtgtctgctgacatccgcacagctcatgtgacttgcccagcgcccatctcacttcgcagcggaagcctgggtcgggagccctgcagtcggatgctcccctcagggctggttgggttccagctgggaatgtgttccctggttaggtgggcgggctcctctagcaagctggcgcttgggacccgccggggtcggactcgtgtgccaccttcacacccacccctccctctctccacggtctccgaggctctcaccagctgctgtcagcgatgtagtggagaactgctcgcgtcctgtgcagtcttcccttttgcaaagcaaagcactgtcacagctgaactcgcttggttccccaggacaacagggagggagggtgggagagtggggctgccaaaaggtgaaagcgagccgcagggaagtgactctctgcaggggtcatgcctcctggtggtggtgatggaggtgatggtactcaaagctcccatttatggagcgcttaacagggctaagctctttacatgcatcgttaatcttggaggaggaaacaggctcacagaggtgccaaggccacacaggtagtagaggaggagctgagttatagcccggcagcttgaatggttctgatcctctgtcctgtttcagaaagcccccagggctccactgtaactacaggacaaagtccacacccgtgggcctggtgtgggaggcctttcccacagaacgcccagcctcctagacacaggcgcctctgcctagcacgcccctcgctagtcccctgcccttcctgaccaattcccgttacccctcccacgcctagacgcaggcgcctttgcccagcacacccctcgatagtcccctgcccttcctgaccaactccccctcccgtgctgccttctgggcaaggccttctctaatccccggacaaagctctgctccgctcgtctgggttcccatggcgcctcctcgctctgttgttatttgttcgggcccatctcccctccctggaccagtgctgcagagggctgcatcctgtccatctggctcctgggaggggtggaaccactgaacgcctccaggaaccttaaggactccgggcaaagtggggttgcttatgagcacccaggccgggtgccgcaaagcctttgtaacccaggcactggggctcaggacagtcagggagcatggggtgtggggaaggaagatttcgttcactgagtccttttttcctgcattcattccttcattccttgccaaccagcgcctgttttgcctccactttgctgtccctgccatgccaggtggaggggcctcccaatggctctcctgctccctctccaacccgctccccacctagcagccacagcattcttgaaaaagcagactttgctattcctgtttcacatcacacttgtgacctccctgctgcctttccctctgatctagtgtccctgcaacaggttaggaagcccaggtataacctggctcttgccaccatcgccggccacgaccgagatcaccttgccatgctcttgctgggttcaagccatcgtggcttcctttcagtcctagaacacgcaggcagctccccacatcctgtcctggaagaccggccccacctacgcacacaggtggctctcactaatctttcaggtgccagcaaacccttccttcctggccctcctaatgggctccccgtcaggtggccagcgatctgcttatctgcgggcctgctgatactcttgccctggactggaagcatcactaggcagtggtgggttgggtttggtgccactgtattccccagtgccccagaccacgtggcactgggcctggctctgggcaggagcgcaatatggcaggtggagaaggaagtggcatgcaatgctgggtcttagtccttgccatgagcagctcagacagtccctaccctagcatagtccctggtccagaaaaggaagtgggcagagaggaggaggagctttagggaggggagtacaaagcctgcctctggtatccccccgccagcctggtgagaatggcagcgcaggactggcaaacaggcccgtctttgctgttgacttgctgggggtcataggccaggatgcttgccctctctgtggggcaggatggtgcccggggtcctttcccactgcgcgtcagtgtttcccatctctccatgtaggacaccgcaccatttagggagtgattggatcccaggacctcctccctgtcacggggtggcaggcaaggttctgataattgatctgccgtgtacctttgtggcaggtgacctaattccccattccctgtgacccatgtgtcacaggtgtcaggggcgaccggccacccagccaagcttccatgactccgttctcactctgtgttctgtaatccccttctgtcacgggcttgggatccttgattcccggcccggttctgcctactatgatcacaatgaacagtcagtgttccgtttccctggagggctgccttccttgctgtgcctggacctgtgttccctgctggacaagtcccagggggtcaggcccggggctttctcggtccctgctgtgtctcctgcacagctccaggcacagagcaggtgttcagtaaatgttgttccattaaaatggagttggggctgttgctggcagagcccagggacagcgccctcatggagcctggcttagagtgcccaagtctgacagtggcctgatcctgtctggtcctggggtggagcagacaccaacaggcggggccatctgactgaatgtcctcccaccagctgttaggtccaggtgtttgtgcttactgccttccagtgcagtcaaaagaatccagggctggcaccagccccttcctcatctcaggggtagaggggtaaccagagaggggcggcacttacccaaggatgccctggcacttgggtccaggctcctgctgctctcctcggccacccctccagctgttttgtttttgtttttgttttttttttgagatggagtttcgctcttgttgcccaggctggagtacagtggcaggatcttggcttactgaaacctttgcctcccaagtttaagcgattctcctgcctcagcctcccaagtagctgggattataggcatgcgccaccatgcccagctaatttttttgtatttttagtagagacagggtttcaccatgttggctgggctgatctcgaactcctgacctcaaatgatccacccgcctcggcctcccaaagctctgggattacaggcgtgagccgccgcgcctggcctgtttgttttgagatgaggtcttcctctgtcgcccaggctggagtgcagtagtgcaatcctagctcactgcagcctccacctcccaggctcaagtgatcctcttgcctcagcctccagattagctagaaccacaggcacaagccaccatgcctggctgattttcttatttttaattgttttgtagagatggatttgcaccgggttgctcaggcttcgttgtgcttttgatttgcatttccttatggctaatgatgttgagcatctttttttttttttttttttttttttttgagatggagtctcgctctgtcacccaggctggagtgcagtggcgtgatctcggctcactgcacgctccgcctcccaggttcacgccattctcctgcctcagcctcccaagttgctgagactacaggcgcccgccaccatgcccggctaattttttgtgtttttagtagagacgggatttcaccatgttagccaggatggtctcaatctcctgaactcgtgatccgcccaccttggcctcccaaagtgctgggattagaggcatgagccaccgtgcccagctgatgttgagcatctttttatgtgcttgctgaacacttgtgtatcttctttggagaaatgtctttttagttcttttgcccatttttaaattgagccagccgggcacagtgattcatgcctataatcccagcactttgggaggccgaagagttcgcgaccagcctgggcaacatagcaagacccagtctctattaaaaaaaaggggagccaggcgcagtggctcacaattgtaatcccagcactttgggaagccaaggtgggcagatcatttgagcccaggagttcgagaccagcctggacgacatggtgagaccccatctctataaaaaaatgtaaaaaattaaccaagcctggtggctcatgcctgtagtcccagctacctgggaggctaatgtgggaggattgcttgagcccaggaggtcgaggctgcaatgagctgtggtcttgccattggactccagcctaggtgagactctgtctcaaaaataaataaaaaataagtaaatgaattgtttgtcccttcattattgagttgtgagagttctatatacgtgtatcccggatgcaggacttctcagctgagcgatttgcaccacctgggatgttttcagcgtgtaatgccagtgcatttccttcccgtctcttctctctggctagattcacagccaccgctagataaaaataaagctgtgaggatactgtagatacagttgaatatcctgcttctgcacttcatttttccgtttttttagaaagcatgatttaaagtacatcactgggctgttgtaattcattctagccatttccgcattgctgagcgtttaggtcctttccagttttcagttgcatagataatgcagtgatgttcgtccttgtccataaatcttcatgctcatcacacgggtagccttcttagaaaaaattcttagaaggtgattttaccaggtcaaagggaaggaacattggaagtctcagatactggctgtgcccacattggacagtgagtgttgagggctagggttctgtcgtcatagtcaccactgtagctttagatttttttctgagagagggtctctctctttttttctgcttttgaggtttaaaccatggccagagacagggtctcgatctgtccctcaagctggagtgcagtggcgtgatcttggctgactgcaaactccacctcctaggctcaagccattctcctgccttagcctcccgagtagctgggattataggcgcgcaccaccacgcccggctaattttcgtatttttagtagagacggggtttcactgttggccaggctggtctcaaactcctgatctcaggtgatctgcctgcctcagcatcccaaagtgctggaattgcaggcgtgagtcactgcacctgaccagattttttttttaatgattgaatgaatagtatttgcatgtgggtgccttgatgttaagatggtgtcttgttttagcgagcgttcttttgactactagttaacttcggttttgtttgtttgttttgtatttttgtgggtttttttttttttttaatggagtttcactcttgttgcccaggctggagtgcaatggcgcgatctcaggtcatcacaacttccgcctcccaggttcaagcgattctcctgccacagcctcccgagtagctgggattacaggcatgcaccaccacacccggctaattttgtatgttttgtagagacaggatttctccatgttggtcaggctggtctgtaactcccgacctcaggtgatccacgcgccttggcctcccaaagtctgggatgacaggcgtgaactaccgtgcctggtcttttttgttttttgtagagatgaggtctcgctatgttgcccaggatggtctcgaactcctggcctcaagtgatcctcctgtcttggcctcccaaagtgctgggattacaggcatgagccactgcgcccgacctaacctgtttattgttaacatgttacatggttctgggaattggttcttcatgccctttgcctatttttattttgggacctttataaggactcctctattgaagatagatgtaattttattgtgcagatatatttgtcctcatttatcatttgccttgcaggaaaggtgggggacaggggtgcaggacactaaagagaagcactttctcctctgctatttcaccgagtcatcatagcaaagccccatctcagtgtgaacagcttgggatggagaaacacagggctggggccctcagagagggcagaggaggcagtggcagcccaggccttggaggccctgcagtgtaggagagagggtgctttagtggaggcccggcctgggaaaagggttagcaggttacagagggtccactgtaaccacaactccagccccatttgctgagcaccaggctgagtgactcggtgaacctgctggtgccccacatttttgcagataagaaactgctacttggggtcattggtcacttgctgaagatggcagaagccagggcagccctgcctgggtccctggacacatccagcccaccacagctatggaggctcagcaagtcccaggagcctcaagtttcagcaggagcctggactccctcgtctcccacagccatggccaccacgtcatcagcaccctctgtatgagggtcctgtatgtcatgtgctgtttccttccagtagcttcctgactcttcaggaatactgttctttgccctgaggatctgtcgcccacctgcatctgcagcctcagctctgctccccctctgccctgttggagggtcctcagaaccgactcttccctctgtctggaaggatggcctggacttttgtgtggctcctgttggcttatggcctcctgtccccatccagtgtaagcttcttgagatgggatgtctggcttttttgttcaccagtgtagcctggcacctagaatagtgcctggcatagaatagacaacaataaatatttgaaggaattaatgaattccctttttcttttttttttttttgttgagacagagtcttgctctgtctcccaggttgcagtgctgtggcgtggtcatggctcactgcagtctagatctcctgggcccaggtgatcctcccgcctcagccttctgagtagctgggaccacaggcacgtaccactacacctggctaatttttggattttttgtagagacggggtttccctgtgttgcccaggctagtcttaaattcctgggctcaagtgatcctcctgccttggcctccgagagtgctgggattacagccatgagccattgcacctggccacatttcttacttttactcatcttttaggtctcagtcgaaatgttcttttctcttatgggtcttttctaactattcctccaaatctgaatttgtatcccctgtgttttcccctataatatgcattttcttcttataactggtaaatttttgggtgatttgtttgccttcctcccagtccttgagggcagggaccagccctgttttgttcacggctgtctgcctagcccaggttgttgcataaagaatgaatgaatgaaaatatgttcattagttcccaaacagacctctgagggttggtggcattaccctcttgttatgaaggaggaaggtgagggtgggcagtaagaaattccaagcacctggtttccatcactggagcctttgctggaccagtaaacagcttacagtttctaaaattccaatctaaagcactcccaaagcttctgaattcagatggccatctggtacccatgaccagaagcctgaggcaggtggcccgaaatagcctgcctggttctggcaggactgaatgtctaccgatgagtgctgggctttcctcagaggccccctttcccgagcctggccctgtcacctactgaggacttgggtgggtggcagtgctaggaagcattgagccactaaatgactcagcaaacccttgtcaagcacctcggtgcccccagctctgctgagtcctctgccggattgtcttgcctgtatgctcatttgaccctgacagtgatcttcagttccccaaggctccaagagctctgtctcctctgagcctttgcacatgctgttctgtctgttgcaacactcttctccctcccttctgctttttaattattattattattattattattatttttaattgagacagagtcttactctgtcacccaggctggagtgcagtggtgcaatctcggctcaccacaacttctgcctcccgggttcaagcaattctccagccacagcctcctgagtagctgggattacaagtgcgcaccaccacacccagctaacttttgtatttttttagtagagacaaggttttgccttgttggccaggctggtctcgaatcccgacctcaggtgatccgcctgcctcgatctcccaaagtactgggattacaggcatgggccaccttgcccagcccatttatcttcttggcatatggaatatgtatgtaatgtacatgtaagttgttgaagtgtaatatgttgaagacctgtgagcctccctcctaatttcagagtgagaacattgccattaactcacctctgcctgtgggtgggtggagggagcccactgtcctgactgttgtcattgtcattctgtgttttttattttttgcggggggcgggggtggatgggtgagggacaggtgtgtcaggttcaataaaaagggaaagggtcatcaggtggcctttttaaaagttttatcaaccatgtctgcatgctgaaaagcatggtgtttcgttctgcctgtttttgagtttcataaacatggtattgtgaggaaattcctgggtcttggtttttcttttctttctttttttttttcttttgagacagtctcgctctgtcgtccaggctggagtgcagtggcataatcttggctcactacaacctctgcatcctgaattcaggcgattctcctgcctcagcctcccaaatcccagctgggattacaggctcctgccaccacacctggctaacttttttgtatttttagtagagacagggtttcaccatgtctgtcaggctggtcttggaactcctgacctcaagtgatccgcccgcctctgcctcccaaagtgttgggattacaggcatggattccttctgatacatttcacctggagtgctgggatgacaggcgtgggattaccttctgatacatttcacctggggcgtgagcaagactttcgctagagtctggagctaggaacagaatggctggtcatagttgatgagtacatttggcttctcaaggtaatgccaatctttctgaagtggctctcgccaccttttacctgactgactcctgcttgttctccaagagtctccttcctggctgtctttccttcagcacctacttaggggagcagcagctgtgtgcctagtgtagttatgttctggggggcaatgcgaacaagactcacagtccctgccctctagtggccagtggtgttagatggtccctctttcaggacgcccccaaccccaagtctgggttaggggtttcctttgccccagctctacctactctggcttgtcactgtctagggatgggtctgccttcccgactggaccaggactcctgtgtggacagagaccaggattagggttgtcttggacgctgtttccagcatgaccctgcccggggcacagagcaggtgctgggtgaagcaggtgctgggtgaagcaggtactgttgagcttgaggcagttggggtcaagaggaagaaatggattctagtatccaggactttctggagtaggacctggaccccaaggccatgtaagcccaaagcctcatactttccctaatgcctgagtgttcaagattcctttacctgtgctgggctctgtggcagagggaggggtcacagctcctgccctcgacagcttagagaagagtcagtgcctaactacacaccccttccatagtgtgcagggctggggatgtgcggctggcagggtcctcacagagaaatgtgaagcccacccggccctctgggagctcaagtgttggcatgtcttttctgaagagggtgagggcaggaagatgtgcattacccttagaaaaaaagtagaaaaggccagccttctcatgcagtgccagagcagttagggctgtatgggggccactgtgggcctgtagattcgtaacaggaatcataatagctagcgttggtggaacacccactgggtgccacgcatggcgttgagccctccgtgcatcagctggttttatcccatccatatcccacgaggtaggtggaattgctgccccattttaccaatgaaggagagatccagctcctcacagctagtcagtggcaaatctgaacttcactcctggcagccagagcccagcccctgccctgcacgatggtagcagagcctgtctgcaggcaccaggcattcagagagctttacctcctgtcctcttgactcttcatggcaaagctggaaatggggagactgaggaacagagttacttggccccagtgctgcctctgatttgaggaggcagggtcagccctgggccatcgctgcctttgtccctgagtctgcgttcccctccactccgtgagctcactcagagagttctctccgccccctcaccactcttggtgattatttatccccaggtcttcacttcggcaccatcaggtgcccagccctgggtaaatatttgtctcagggcagacaggagtgggtgtggtcagcgtttcagagcccgggggcaggtggaggcagcaggtggggtggtgactgggggcccctggctggagctggtggctctgcttgctctttgctcatccagcatccactctcccgggggctgctgaggcgttggcctctgcaataacaggggcttccgtttgccacgcgccagccccacactagacgctttacacaagagagttcagtggctgcttttagaagtctttgtgtgtcagtctcagtctcattggctccattttgcagatgaggagactcagccatgaagggtcgagagccattgcctgtgtcaactggggtctgttgagttatcagggccagaatccacctggggccacaggaggtgaatgagggtgttcattggatggaggccaggctttgcctgttcccaggggtcctgaaagctggcaggaaccaggtctgccacctgctctctggaacacatgcactccttgttcctctttctctcttcagaacgtcttccactaggctggccatgggccacacaagcccagccctcctggtgtctggaacaggaccacccagtccagccccctgacccgggcagctcatgcaggcttagctaggaccccacatcctccctgtcaaatgggcgatagagggccagcccacgcttgttggggtggagggcagtttttagaggaggctctgcagacaccccaaataggcacccccaaatacaaggtctgactgcaaaggccatgccctcactaggttgctgttacatgtgtttagaaggtgcattcacaggctgggcatagtggctcacacctataattccagcactttgggaggccgaggcaggaggatcacttgaggccaggagttcaagaccaccctgggcaacaagtgagacccccccccccatctccacaaaatataaaaaattaaattttcggaaggtgcattcacatcacaaggcagaaagtcactagtgtcctcagatgtgtacatccctttgggaagctccttccagctggggggcttatggaggccataaaggaaccccctaactccccctacacatcccagcagaaagccctgggctaggggacagtcttgggcccttgtgttctgagagtgttattagtctccaccacaggattggctgtgttttcttagtggttcaggcatgcattcagcgagtattgagctcagtgcccagtcctgtactggggacacagcagtggcaaggcaagcccggccctgccttccaggcttattgtccagagagagggaagtgtgggaaacaagttggccaaccagcagacagcaccactgcagattgagagaagggtctggaaggaaataaaccaaggctggaacagaggagacagtggcgaggctggtgggtaggtacctggcttgggtcaggatattgaacgccttaaactcttgggtgaggcatggggtccaccaaccagatgaagtgggctttgaagtcaggcctacctgtgctgtgtgtccttggcacatgctccatctccctgcgcctcagtttcctcctttggaaaggatgggggagggatagctgtaccccaaaccgtggcatgaacagaaaggtcaagggtttggctaagagtgaggattgtggagccatagactgctcaggctcgaatcccggctctgacttttactgattctgtggcctcagtttccccatttgaaatggggataataaaccctacctatcttagggttgttgaagacagtaaatgaggtagtatatgtaagtgcttgccattgctcgta[138 bp omitted]ctctgctaaaaatacaaaattagcctggtgtggtggcgggtgcctataatcccacctactcgggaggctgagggaggagaattgcgtgaacccaggaagcggaagttgcagtgagctgagattgtgccactgcactccagcctgggtgacaagagtgagactctgtctcaaaaaaaaaaaaaaagttgtgtgtcacatggggggactcgggtgcttagcacactgcttgactggggacccagggattaaggccttgacttccgctttcatccaagcctgccattgaccttacatgcagctgctgtgtgtgaggcgctgtggcatgagggaaggtgcgcccaatctgccttgttccttccgtcccaagagacttggaaagccatgagtgtgttctgaccgcatctgtttctgtaacaggatcttcagctgcggcaggcagttgggaaggtcaggacgaggggaagggaaggcaggcctgtggcacctgccatctgcgcccttcactggagtgggcaggccttgcccacatccctgcctgaggcctggggtctggaggcctggctccttgttggctatgtaagcctagcccgccccctggagctggccatcctgcagcatgtggccacggtacccactggctgaatggtggtgcctccctgccgggaagggcagagaagagcccctctcacccaggaaactgcaggactcacggcctctcagcaggcctgaggagggcacgggggtctgagagggaaggaccggccatcccagcctcccctgagcaggctaactttccaggacgcattgcgggctcccttccctccagcccgtggttctctggggagaagggaagggtggacgttgtcttcatttcccagagtgagtcggtgcattcgttcattcatagactcacagcgacagacaccacagtgacgtccctagactcagggagcccttggtctaggacagaaaacgagcaagtagatccttagagattgggacgtgtccagtgaggaggcagagtgttgtctgggtgtggtgtgggggatggggatgggggtgctgctacagaaaggggtcaggagaggcttctcagaggaggtgactttttttttttttttttttgagacagagtttcgctctttttgcccaggctggagtgcagtggcacgatcttggctcactgcagcctccatctcccagctcaagcgattctcctgtctcagcctcccaagtatctgggactacaggcacgtgtcaccacacccggctaatttttgtatttttagtagagatggggtttcaccatattggtcaggctggtctcgaactcctgacctcaagtgatgcacccgcctcagcctcccaaagtgctgggattacaggtgtgagccattgcgcctggccaggaggtgactttcgagttgagatctgaatggcaagtcagctgcggcttaagctgcaggaggggagggaagctgtcagagggagggaagagcagttgcagacccggaggcgggaacaaaccacaaagcctgtagagtggctgaggaggcgtgggcgagccgagggtgagccccggtggagtgctggcatcagggggccttgtcctgggctgaggagttgaggttttactctcagtgcagggacaggtggtgccgagtgaaagcctgtggcagcaaccagcccgctcctgcacggtctcctaagctaattgtgcgcctgctttgggtctgaatggcggggactgcacaggacgtgggttttccttctacggtgggaggtgatctcagggagtctccctgcaggtccccaccaggtcttctgtgtgcctaccatgggcatgcagttctgaagcgctgactggtggtgggaaacctagcctggagattgtcccagccatcccacccaaggcagggacaggccagtggggctacccgagcaaaggcttagggcagctggtagaccgggctgcaagaatgaggccgcagagttagtcttagagtagcacctggcaggaggctggctccgtaagccagtgctcgtccttggcattgttgactcagtggctcagctgatgagcccgaggctgctggggaaggtgtcctcctcagccttacagctccagcccccgcgtgatccgcgtttctcaggcctctgggttactgagaggctgttgggggtggaggtgcccagcggttgttcactgggaagaagaactcaccaccagcgtcccttcatttttcccaaggagtcacaggcagaggtttttccgaacaggctcagcagccagaagtccccgcctgggcttccaactgcctacagaggtagctgcagccctcccctcaggctggcctgtgtcactgccctattctatgtccaggcctcccggcacccagccgctgtccccatgagtgcccaggggagctcccagtttagcagggggagagggttccccagtgcagagtgggtgggaagcccggggcctgtgacctgtgtcacagggcatctgaggatgttgttcctggaaggcaagtgtgtggccacggagctgactttgggctctcatttaggaggctgactctgaaggtcatagtggctcagcagtgaaagaggaggatccccacagtgtgtggtctgtgtggtcactcagggatgtgacctttctgaccctcctcttctttgtcttgggttgggggtcccggccatatccccttcccagggatgtgctaaggtttcagggagctcgggtacataaagggcttgcctgagataactgcgtagtaaatgacagctgtcagtggactccctgccgaacgttgggacaccacagttacggacttgtgccaggagccccagcttcctgccacccctcaccgtgtacctcagagttctcctttgacaaccctccatctggctgtcctgtccctcaggggtgggcatgaggcccaagttccttccttcctttagcccacgttcactgagcacctgctggccgggccccagggagccacccaggtggctgcctccacagccgggctgggctttataactaattctgtcgtgagagactggccttggtgccagacctccctcccggcccacctgccgcctctgggttccttgtgggccaccgcctctgagcagctgctgcttttttttttttctcatttaactttttgttttgttttttggtttttgagacggagtctcattctctgtcactcatgctggagtgcagtggtgtgatctcactcactgcagcttccacctcctgggttcaagcgattctcctgccccagcctcccgagtagctgggattacaggcacgtgccacaacacccgtctaatttttttttttttttgagacagagtcttgctctctgtcacccaggctggagtgcagtgacacgatctcagctcactgcagcctctgcttcccaggttcaagcgattctcctgcctcagcctcctgagtagctgggattacaggcatgtgtcaccatacctggctaatttttgtattttgtagagatggggttttgccctgttggcccgactggtgtcgaactcctgacctcaggtgatctgcccaccttggcctcccaaagtgctgggatcacaggcatgagccacggtgcctggcccgtttaactgtgttttgatggacattttcagacacaagaaagtaggagtataatgagtctgatggaccgacccactttctggcttcagaattgatgactacatggccaatctgttcctgcctatctccatgccactctcacctgcattattttgcagcagctctaagatagctatcattttacctatacattgcttgtgaaacagtgggaacactcagccccaagccggcaccctctgtcctccactgtcatctgccccaggcccaggatcagaccactgggaaagtggccaggtagggctgtgtctcttgtggctctgcacacatgagaggtggtgggtgtggtgctcagagaagagccagctccaccccccagcaccccgcacaaccttgctgtttgaaggaggccgccgccccaggaggggctttaggggctgccaggaagcccggagaagggcctggggtccctctttgttcctggttcccggctgcttcactggctactccatctctgtgttcatttgcttttaaatgaggagcacagattt[136 bp omitted]gcctcccaagtagctgggactacaggtgcccgccaccacgcctgactaatgttttgtatttttagtagagacaaggtttcactgtgttagccaggatggtctcgatctcctgaccttgtgatccgcccaccttagcctcccaaagtgctgggattagaggcgtgagccaccgcacccggctttccccacttcttgcataaagggtagcattcatgagcataccgttctgcaccttgcttttttcatttgtgtcttgaaacctgttccctgttggctaagagagcgcacactcattctctgtggcggcagggctccactgcgtggatgaactctggggagctagccggtccctgctggtggatattgtggttggttccggttctgcattcacaagctgctgcagtgactgtccttacatgtatgatttttcatctttgcaagtatgtctgtaggattaatctccaggtgtgtaattgctaatcaaagggtatatgcatgttacttttttttgagatggagtcttgctctgttgcccaggctggagtgcagtggcgctgtctcattgcaacatccgcctcccaggttcaagcgattctcctcccaagtagctgggattataggcacccgctaccacacctggctaatttttgtatttttagtagagacgggggtttcaccatgttggccaggctggtctccaactcctgacctcaggtgatccacctgcctcagccttggcctctcaaagtgttgggattacaggcgtgacccactgtgccccgcacatttgtacttttgactggtcttgccaaattgcctttgagacggaaccatgtccttggtcaggtcctttctcatctctaagcgtcccctggaaagttggggagataatttctatttctcagggccattaggaagtggaaacgagatcgagtttgtcaatcgcttagttttgggagtgggcgcaaagttacggctccaccggtaaagcacagtagaagggccccaagcagtgtttgttctcttcccccatgcctctctgctgagtgccactggggattgtaggagtggtgggagagcgtggggatgattactgttgggaaatgcatggcagtggctggaagagggggtcagaagcacagacctgcatttacactcacactctgggatgagggactttcctcctcagggcgtctgtctccctgccatgggaggcagtgcatgtgtcagccatggccctcggctgtaagcccagaaacagacccctgcagaatttgtagcaagggaatgtgtggggaggatgtcaccaggcaggaggacagctgggccctcgcatgggcgggattgaggccactggattccctaggtagggagctccccaaatacaggaagaaggttagaggcaggaagagccttttctacccaggaaacctgaccagtgccacgcagtgaatatacagggtcctcacgcaaggacctgagagatgtgtgggcagctgtgtgcagtgtatacagggagtccaggggctggtgtgagccctgctcttgaggggcctctggatgcccgcggtggggtgctggggcctccacgggcgtcattctgtggttgctccaggattggacttagaaatctgggtttgactacatatcaggctgccctggggcccctttcagtaaagatactcccctgagaaatacctgcccttgggaagcccactgcattgggcttacatgactgatcagactctgattctgtgtggagcagcctggggaagggcttggaggcgggagtgaggatggtctccacgtgggcagtgtagacgtgtggttttgcagggatagagacgtgcagcagcacatccgcagaggtagcgaggccttgggggtgtggggttcccacagaaagctctgtgggtactcttctgcctcctcctccctatttcaggccccaggaggccttgtgtggttctgtccctcccctgccccccaactgaggccgtggcattgtgggagcagaggacggaactggacacctagtgaaggtgcgtagaaggcatttgccccaggctggctctgggctgagcacacccattggtgacctcatcacgtgcacaccttcgctgcctgagtgcagggcacccaaaagcctgccatagacaagaagggaccttccctgagttcacccagctggccctgtctgagttggggactcacacctgtgctgactccagagacccaccccagccccaccttcctgttccttcagtcaacacatatttattgagcacttactgtgtgcccagtaaagacccttctggggatatttcagtgaacaaaaggggtaagagttctcccctcattatagcataaatgcacagatcagtacgcttcctgctgggtcatgagaagtgccacctagagaaggaagcagggattcatagtgataaaggggctgactttttggagggtggccagggaaggcctttgaggaggtgacttgggagtgaagacctgcaggcagggagggaaggagccgttggggtgtgaggaagaggggtgctctgggcagggggtaacaggtgcaaagaccctgaggcactgtgtccagatggctctgccactggcaaggatcaggacctcaatgactgtagcagcccctccccagcacccccaagtgaggtctggccatgcagctctcccatgtgcatgctttgcctcccgtgctccataagcaggaccttgacccctccagcctccttgctgacccctctcgtctcacactccaggtcccgatctgtgcagctcactgccagatgcatcaggcagcctcctgcacctgcactttcttcacaaagttccctctgccagagacgccttttgcatctttgtcatctctgagacttttccagatgcctcccgctgcagctgatcccagcctggccatcctccccgcctccatgtcccctccctccctccctccatcatagccttgatgctgttctgccactgcccctggatttgtctcactgattgtgcagaaggctctgggacagagctggcttgtgggggattgggccactgcctattggaggcatttgggggctgtcccaggggtgagtgcaccccaggctggaccaggtgcccacacctctcccgcccagcactggcacctgtgaagggcctctggaggctgggtcttcctgcaggcaccaggaagaaacctacgagcgcatccttgctgagggcaggacccgctctccacatcctggaaacccaacagagaaagacagtctctctggcagcctccctgtcttgaagttcgagaaggctgcatttctaggctcccacaacctgtctgtccggtttgaagccggggcctgagggcttcagggtactgatgcaggacagacagctctggttcaaacctccctctgtccgctcccacaggtgtggcctcagaagaccattccctctgtagcgtggtagaggctggaaattctactctgcaggattatgatgcggattaaatgcagtaatcgagtgtttggcagagtgcctggtagggaaggggttcagtaaagagctgctcgcaccattctgtgcagggaatgctttagggcatgttttagaattttagaacgtgtttcactacatgagtagcttcttgcagctttgaggccctggcatccctctcccctgcctgcaggcttccttgttcactgggccaagtccccgcagtaatcttcctaagcatggagtagaccgggcccttcctggccagaacatccccatctaccttcagggtctactgcagtggccagatgtgagcttctcctctgtccgctcactcaccttctctgtgcctgtcttggccccttctctgtgcctggctggccccatgtggagcaatgttggggtaacagtgtggaccacagaccaccccatgctgtcttcctaggactcatagtccagtgggggagacacacaggtctccagatggtgacaactcagaggggacagggctgagacggggagcccagagggtggggcctgacctaccgtggggatcagggagggcttcctggagaaggcatccctaagctgagaattgaagaagtagtaagcagtgagagcatgtaccgtgtaatgtgtaaaggggagggagaatgtgaggtgctgggaagcaccgggcccttcgggggacgggaagaatttgggtgtggccagagcacagtgccccatgagtggagaggtccagattgtctatttttcttttcttttttttcccccaatgatcctagaaattctcccaagagaggtccagattttttgacaaggctgaagggcggcccctgagacctgactctacctgtctgcctggcctttcctcagtccagtgcgtgcacggccccctcctcgctctcacgcatcatctgtgtgctccttccctgccagacaagaacccctggagggcagggaccagttcagagccatccctgtctccccagtgccagcacagagcttggcctgagtaggttttggggactgggcttggtggctcacacctgtaatcccaacattttgggaggctggggcaggaggatcacctgagcccaggagttcaagaccaacctgtacaacatactgagacccggtctctacataaaaaaagaaaaaaaaaaaaaactggccaagcatggtagggtgtgcctgtagtctcagctacttgggaggttgaggtgggagggtcacttgagcccaggagtgcaaggctgcagtgagctatgattgagccgctgaactccagcctgggtgacagatggggaccccccaaaaaataggttttgggaaatgtttaccagatgagaggcaagacggaattctcctaaattcgaagcttggaattctcctaaattcgaagcctgaggcagaatggttgaagcaaaaagaggagatttgttgtcttatgggtctgaagggtcctgaatagtgtggtgtcaggcacagtatctctttatc[209 bp omitted]gaggcaggagaattgcttgaacctgggaggcagaggttgcagtgagccaagatcacaccactgcactccagcctggcgacagcgagactccatctaaaaaataaaatatctgagcttggctttcctctgagctggcttcattcgcggaaggctgttccctcctgatgggtgcagggatggctgccagtagctctagaaatgggatgcagtcttaaccaccctagtgggaagagagctcctctttcctgagagttccatctcagggcgtaggaccggctgtggctggctctgtaaccttcctgtccctgaccgatcattgtaacagaggttgtgggacggggcacctatccactcctagaacctttggggaggacagcggggagtcaaggtaaagtgaagaggcctatccaggctcctggggtgagagagattgggtgaccaaggctggtccacccaggggaagacaggaagagaagtgggccattctggcctcagacctcttcgtcctttcccagaccccacgccaaggcagagctccctgtgggatgagtttctcacttgacctgaaatctctacttgtggggctgctgcaagtgcacaggcttcaggaaaggtggaccacaccccctgtgccccaggctccttcccgagggtgtgcagcccaccatccagataggggtggatggtgcccaagtcgtgggggctgacaagcatggagagtcctgcagagaggcccagcaccggattcccaggctgctccttgagacgctgtcccacatgggccggtcactcacctgccatgagactcccaactgggaccttccctgcagagcctgtgaggtggaacgatggtgatggtgcccccttgtggggtaggtgcatgtggcaggcacagagtggtggcagcaactgtaacatacggttctggagggcagggacaggggcccttcctgtgtgccttgtggtgctgagtgccaggctgggtgagctcaccaagccctccctgggaaggtgctgttgatgcagcagggaggcccagggcagtcactgctctgtgctgttggcgacggagcagggattggaacccaggcgcctggcttcgaggcccgcatgctgtggggaaatggggctctgccatgttggtggttatttattgtcgtgaacaagagctcaggcctggtttccaggtgtgactttattgcaccctcgccctacctccccggcttgagaattctggaaaataccacaataagtgtttcttttctcttttgagattatgtaaataatacttgcctccatgctcttaaaagaaaatgacatctctatttccatgtgttgcggtgtttcctggtttgggaccccaccagctatccagtcacccaggcttgaagccaggttcttcccagcttctctctccaccctgcccatccctgtgcatgtagcagtgaccaggtcctatcgattatctgattatctgccggaagcctcaggaatgggagccttctgagtcagcacatcaccaggagcacggcctgtggccaggctgctcaggggctggtgatgttggtttctttcaccttaatgtgtgagttgtgtagtaatacggtcctatatcacttaatgatgacacattctgagaactgcgtcgttaggtgatttcatggtcatgtgaacatcctagtggacttacacaaacctaggcctggtcaggcctggtggctcacacctgtaatcccagcactgtgggagttctagatgggcggatcacctgaggtcaggagtttgagaccagcctgaccaacctggtgaaaccccatctctattaaaaatacaaaattagcctggcgtggtggcgtgtgcctgtaatctcagctactcggaaggctgaggcaggaggagaatcgtttgaacctgggaggtggaggttgcagtaagctgagatcatgctattacactccagcctgggcaagaagagtaaaactccatctcaaaaaaaaaaaaaaaaaaaaaaaaccctaggtggcatgcctactgcacacctgggctacctggaatagtctagtgctcttgggctccacacctgcacagcatgtggctgtgctgagtaccctcggcaagtgtaacacagtggtaggtatttgtgtatatgaacgtagacaagggacagtaaaaatatagtgggaaatcttatgggaccaccggctgcatatgcagtccatcattgactgaaatggctttatgcggcttatgactagacctgtatgtgcctcagtattcaaaagatgtaaaaaggtggacagagattcaacataaagaaatgatcaatgtttgggccgggcgcggtggctcacgcttgtaatcccagcactgtgggaggccgaggtgggtggatcatgaggtcaggagatagagaccatcctgactaacacagtgaaaccctgtctctactaaaaatacaaaaattagccaggtgtggtggcacatgcctgtagttccatctactagggaggctgaggcaggagaatcccttgaacccgggaggcagaggttgcagtgagccgagatcgtgccactacactccagcctgggcaacagagcgagactccatctcaaaaaaaaaaaaaaaaaaagataaatgtttgaggtgatatgctaattaccctgactcaatccttgtatgcatttatcgaaataccacatgtaccccataaatatgtataataattatgtattaataaaattaaacattttaaaaaatgtatatagagagaaggaagtttctctctccctgtcctcctttggctttgccagctcaccttcctaaaagcagtcacctagtttattgtatgtccttctggaaggatctctgatggagcttagctaatgacaatccacagcagccacagcccaggccagccgacagagtttgtaaataaagttttatttgcacatgtccaggctcatttgtttatatactatctattactcttttcatgctacaaggcagagttgagtagttgctgcagagcctagtctgatcatttaagcaaaatattgtgatgcctgcagctgtgtgtgtttaaagtcaaggcagggtggtagaggcagcggcagcagcaggcccagaggcagcggttgggtttgcagcgagaagacaaggttgagtcagtgtgtttgcgagagctggaatcgaagcctcttaaaatggcagatgatttggacttcgagacaagagatgcaggggcctcggcctccttcccaatgcagtgctcagcattatgtaacactggcttcgtggtgctcaaaggctggccctgtaaggtctttgagatgtctgcttggaagactggcaagcacagccgcgtcaaggtccacctggttggtattgacatctttactgggaagaaatataaaaataactgcctgtcaccttataatgtgggtgtccccagcatcaaaaggaatgactcccagttgattggcatccaggaaggtacccctcactgctccaggacagcagggaggtgcgagaggaccttcttcgtctgccagaggagaccttggcaaggagatgagcaaaagtaccgctgtggagaagggaccctgatcaccgtgctgtctgccatgacagaggaggcagctgttgcagtcaaggccatggcaaaagaactggctcccagggtgacagtggtggcagcagtgatcttctgagactgcagaggccccctcctctggccttctgtaggctggactcttcctacacaatgtatttgatgttttattttgtttttcccaccccttcaatctgtcggggagcccctgcccttcacctagctcccttggccaggaacaagcaaagccatggccttggtgaagctgccatccttttccctgctcgcactacagccctggttggggggagacggtgggcgatgcttgtggtttatttatttgagacagagtctcactctgttgcccaagctggagtgcacggggcaccatctcggcttactgcaacctccacctcttgggttaagcagttctcctgcctcagcctcccgagtagctgggattacaggcacgtgccaccatgccaggctaatttttgtatttttagtagagacagggtttcactatgttggccaggctggtcttgaactcctgacctcgtgatctgcccgtctcggcctcccaaagtgctgggattacaggtgtgagccactgagcccggccttatttatttattttaattcaatctggaatcagaaagcggtggattctggcacatggtccttgtgccctccccactcacccctggtctggtcccctgttccccatggtcctataccctaagcacgacccccacagactaaggccagccccctgccgtacctgtgcctctccccaaacccctttagatggggagggaaaaggaggagcggggaggggtcctgcccccatgggctttacccttccctgcggtctctctccccaacacatttgttaaaatcaaacctgaataaaactacaagtttaatatggaaaaaaacaataatagtcgaggcagacctgggccttttagtctgtactcttgcctctgtgagccttgactctgaaaaggggatagtaaaaggatgtctcttggggtggctggggggcttctgtggggtccaggcagcacaggacctaaccagcagggtgccaagcagggggatgcctgggctgcaggcattgactcgcctgtgtcccacaacccctcttggagctggagcactagcgggggctcagctgccaaaacccagggacaggtgaggctgtcaccatccaagatggcaatctggtgtgccattcctgactgccaacctgcacgatcaggtcccctccccgtgagtactacaggggaccccactcctgcagaatacaatcctcccatgagcctgaatccatcctgttgctgctctgcccctcgcccccagtggctccggtctcctgcagaatgagagcgaagtcctcaccagggtccacggggtcaccgtcccacatcatccccagtgctcccctcccggtgtgctttggcgccgagcctgctcccaccgtcacacttaagcctgccccagtggttgctgcctgccacggggtttgcacagggactgcgcagtgggcctcctgaatgaagacccagacctgagcccggtggggcctctgggaacactcctttcaaggccagctcaccctggctcctttctgttcattccaaaataacaaaataacacctgcattgcaaagcgtggttattctgagcctggttgccatcacagtcatatggggacctgttaaaatctgggcccctgggccctagctaggacctcctgactctggtgctctgtgaacctggctcgcagacgtcccgatttcatgtggtggacactggggcatgggaaggtcatttccagccagaggtagcatggttgttacggagcagccctaaatattcctgctccaggcttgtctggacttcctccctccccatccctcctctgagagttgacaccctcccactgtgtcccccagcccgcacagtgttgcttcctggtgttttgactcccacttggatgactgtgtctgtttcccccgccctgctccaggctggcacggatggtgtgagtcatcaccgccccctgatgcccaacctgtccttgcatctcttgggtaccattgcacctgtgtgcaaatgccagacagacatctctctgcctgtcacctgatgcccggcgtcaggtttctctctgtccctttgtgagggccacagccggcgggagtgggaggcaagctctgtttgcccttcatcctctccctggggagctggctgccacctgctgggcgagcggcagagccccatccctgcagcagcaaggccctgcccgccagctgctgcacagcagcatctctccctggagctcatgcctttcaccatcccacccagggctccccacaccctgcctccgccccagcccttcccctcctcaggccagacaagggagccgagagttgagctgtgctgtggtttcaggtcaagacagtcctggggtgtgttccagtcctgccacttccaggctccatcccttgggcaggtgtcttttcttctcccagattgcttccctgataagatggaggtctagttatgccagcatcataggggtgctgagctggccaagtgaaattgtgcatggaaagtacttaggagctgggtgaggcggctcacgcctgtaattccagcactttgggaggctgaggcaggaggattgctggagcctgggagttcaagaccagcctgggcaatatagcaagaccttgacccctttgttttttagaaagtgcttattagcactatgcattacacagagtaagtttctgataccgggaagtggctgccaccatcaccaccaccatcatcacgtttttctccatttgtgtctcctgctgactaagccacactgtgacactggtgccagctacttcatgggtgctctcacgtcccttgttgcctgcgaccccacaggtgtccctttcagggagggaaagaggttgctgtggtcatttaacacagcctcggcaggccagggatggaactcaggtcttcttattccaagccgttacctctgcagatccatccccaacacatgcctgctttgtagaaaatactcacacacccaaacacatgtgttttgaacacacctgtcctcctctctgacagccacttgaattctggtccctgcttaatgggccttcagagccttggacttgagcaaatgcatctgagccctgaccttgagacccacactcacacacgtgcccacccccacatacttgtgtgcacatggtggatttactgcatgctggaaaaacaagaggaatgtaaaagctaaggagcagttacgtattttttcttttcttttttttttaagagagtctcactctattgcccaggctggagtacagcgacacaatcacagctcactgcagcctcaaactcccaggctcaagctatcctcccatctcagcctcccaagtcactgcgaccacaggcatgtgctaatttttgtattttttgtttgttttgtagagacagggtctcactttgttgctcggctggtcttgaactcctggtttcaagtgatcctctcgcctcagcctcccgagtagctgggattacaggcacacactaccacgcctggctaatttttaaatttttggcagagatggtatcaccatgttgcctaggctggtctcgaactcctggcctcaagtgattctcttgcctcagcctcccaagtagctgggactacaggcacgcaccaccatgcccaactgattttttagttttttgtagagacaaggtctccctatgttgcccaggctggtctcgaattcctgggctcaaaggaacttcctgccttggcttcccaaagtgctgggattgcaggcatgagccactacccctggaccaagtgagcatgtatatgtgtgtgctaagcactggttccagggagggaccctactaactcactcactcgccacacgaccctgggagttagttacactcatccccattttagggataaaacagttgaggcacgggtcacattgctttgctcaagagtttgagttgggcgctaggatttgactccaggcagtctcgccccagaactcatgttctttttgtgtgtccgtgagaaggagtttcactcttgttgcccaggctggagtgcagtggtgcgatctcagctcaccacaacctccacctccacctcccgggttcaagtgattctcctgcctc[225 bp omitted]aggtgggacctgtgagatgctgtgaagcccacctaaggtcactgagtgtgtgagagagacagcaaagatcccagccccatccctcagggccacagctgtgccctaaccactgcgcagcccttccctttggaacctggctctgagctccagcccaggccctacaccaaagcctttgaatgaactacagtcctgccatggctgtttggccttgcctgtggaataggggtcctgtggctatgctcccctggatcctggggacccacccctttatgagacttcagtcactctgcctggaagccgtgactgacaaagatcacctgcttcctgctgccttaaaggagacactgggcatcacatgaccttttccatgtccatcatggggtcatgtgggctgtgacatggcagagtcagatgggtccaagctggccctgtggtcagacgtggtggacccatcacctcccctcgtgagtccgcattgagtgcagatactgaggaactgggtgtgaaatgcctcgggtagcatctctcatgtggttagtgctcagtacgccagagtcagttattttgacccacgcctgctcatgaactgtttcacgctgccattttcttcttagccacctcctcacaccattttaaatggacaggtgtgtgtaggggcccatcctgggccagccagctgctctccctgcaactttggacaagttatcgcacctctgccccatgccgcagttttctcctctcttttttttttctgaaattttttttgtagagactggctttgttggcaaggctggtctcaaactcttggcctaaagcaatcctcctgtcttggcctcacatagtgctgggattgcaggcgtgagccatgtgcccagtctcctctctaaagtgggaggatactaatactcccgtgatggaagtgatcagggaattgaagctgtgtttatttgcattggaagtgctggggatgggcctggcgggtgtgagtgctgtcagcgcgaacttcctctctgatctgcccatgctgctctttcttttttcttattaatagattggtttcttttttatttgaatacatttggcctcatttctaagcaatagtatttgtaaaatcttagttttggtgtgctcattccttttttttttttttcttgagacagagtcactctgtctcccaggctggagtacagtggcacgatctcggctcactgcatccttcacttcccaggctcaactacttgagagtgcctcagcctcctgagtacgtggaactacaggaacccaccaccacgcccggctaatttttgtatttttagtagaagtgcatttctacggcgcttctgtaagcacttgggcggatgtgacctcctcggtctctgactctggtggtgactcctgcaaggccggacctggttccagaccctgtaggtgcccagctgaaggtgtggtctgattgctgtgtggggagtgaaggttgccagcctagaaactgggcctcaag[143 bp omitted]aaaccccatctctactaaaaatgcaaaaattagccaggtgtggtggcgtgtgcctgtaattccagcaactcgggaggctgaggcaggagaatcgcttgaaccagggaggtagaggttgcagtgggctgagatcatgccactgaactccagcctgggcgacagagtgaaactctgtctcaaaaaaaaagaagaggtgccatcccaatgcatgagaccggctgccattgtgtcaggggttatggtggtatccaccctgatgccacagccagctctgggccagcctcctcgccccagcggtgcccacccccagcttgatcctggaccctggcaatggtgtgacatgagctgctgctaagcgtttgcagtgctaggcccgggccggactttctccacaaacgatttagttccgttagttcacccaccctgtaaaacagctacgcttctcttccccgtttaaagcttgaggaagctgaaatgtggagagttgagagtggctccagagctcctgagccaggggctaggacttgaaccctggcttcagccgccacagaggacagcttagggtgggcctggcctggctccctgcttcacagagtcgatgcgttcgctcctggatgaagcgcctggcacgaagtccgtgggcagcgctgctctgtgtgtcttgtgaattcttcttatgcttctgatagttcctccaattttgcatttcctttttttttttttttttttggaaatggagtttggctcttgtcacccaggctggagtgcaatggcgcgattttggctcactgtaacctctgcctcccaggttcaagtgattctcctgcctcagcctcccgagtaactgagactacaggagcgtgccaccacacccagctaatttttgtatttttagtagaggctgagtttcgccgtgttgccccggctggtcttgaaatcctgacctcaagtgatccgtccacctcagccttccaaagtgctgggattacaggcatgagccaccatgcctggcctggaatgatgatttttaaggcgaaacattaaataggattgcaaaggatgccagttggaatatcattagctaaatgctcttcctcactgaattgacatgtgaagcgataggatgtagcagcagctgtaataaggccttcagtctcagagtagtgatgggcattcagaatctgcagtaacttgatgcaatgggaaaatatctgtcgtttcttttcatgtcagtctcaaggtctgctaaacactgtttcttttctctctctcttttggcctctgttaataagaaggaaatgctaaatttcagttccattcatgaaaataaagagataagtgtctcccctcaagttcgtgggccctttgggggtcaaatggttaagaccagggcatgcatgggcttgtccatggcttggggtagctgctgcagtcctgggggctgccttcccaggcagggcaagctccggtccccactagagctccagggtcaccaagcacatgggcctttgtcagacagctccctttctgtctgcaagaggggcacctgccatcagctgatcccctgcagctcctcccaggcctccacccccaaggaggaggaagtgctcaggcagggaccaggcctgacctctggggaggctggcggctggcctctgtcggcttctttcctccagcaccgcagttcagcaacccaccgccacccagcacagtggccagagcggagtcccagggtctgatgttagactctgctctggaccagccacctggtcccagggagacaccatactttacccagacctcagcttcttcccctagaaaatggggcagtgcttgatgagaccaggggtccagagcccctggcctagcagggtggcaggaggaggagtccacacggagatattactggactgggagctctctcagggactcccactgcgtccagcagcagcggattggcagcagggcgaggggccccccccccaagaagctgccagcaagccctcttcctggcccccttccctgcccattgtggcatctccatgcccaatatctgctggcccgaagatctttctaacggccagtcctgacctctccctcttctgctcctagcctttccttcctgctccgctggtcaccctgaggtaaaatccaagctctaatagccaaaaactggaaacagtacaaattcctgtcagctggtgaatgggcaaacacaacgcagcacatcctataattactcttcagcagtataaagggactgaaactcacgctcattatgctcagtaagagaagccaaccgcagaaggccacacagtttcaattccattttaatgaaatgtccagaaaaggcaaatctgtgtagatagaaagcccagccctcccttccgcatggtggcggctgtggccctccagggaccggggctgcagctgttgggtttgggctacgtcccttcattcatgctgggagccactgcctgttagcctgggaacacccgggaccaggcctgtctcttccaactgcttctgtgtcctgcgtcaaggggccgggccctgaatagcgtacggcgatgtttagctgttgagagtgttttgggagtggggatcctgagaggcacgtggcattgtagttgagagctgagttcaaagcccggctcgcatatataccaggtgtgtgatcttgggcaaggttgtttctctgagcttggtttcctcatagggttgaagtgaggattcattctttcacccaaaaatacaaaaatacaaaaaaaaaaaaaacaaaccaaggaccaagtacagtggctcatacctgtaatcccagcactttgggaggctgaggcagaaggattgctgaagcccaggagttcgagaccagcctgggcaacatagtgacaccccatctccaccagaaataaaaatgatctgggcgtgacagtgcaagcgtttggtctctgctgctcgggaggatgcttgagcctgggaggtcaaggctgcagtgagccatgttctcaccactttacttcagcctgagcaacagagtgagaccctgtctcaaaaacaaacaaaacaccgagacagtgttggagacatggtggtgaccaagacagccccagtcctgtcctcctgggctcccgggctagtaggggaggtggctgatgtgtagaaagattgtgtgctgttcattgtgtatttgtgtgaaggtgcttggagcggaggtgaggcgtggagggcagtggtgacttggggtgggggtgcccaagggcactttacctcgggcagtggccagcggggggcctgaaagggaggacagagctcaggcagcctgttgttgggggagggctgaagagggcagtatgggcagaggccttagggcgggagtgggtggagccccatgaaggactcggggtgtggacagtcacaggcctgggtcccctgtgcctgcagcccagaatgtgaccgtggacgaggtcatcggcgcctacaagcaggcctgccagaagctgaactgcaggcagatccccaagctcctcaggcagctgcaggtatgggcgggacagggtgggtgcgtccggtgtgggtgtcaaggggggccctagggtggaaccagcccagcaggagagggcctcccactccccagccccaggtgttcatgaatacatctttgaaagcctgctgctcagctagagaatgaatcagtttcttcataaatttgaagagcacagaattctataaagtaagacattcaggtatctgtcagccccaaaagaaacgctgttccctggggaagaggcatatctacgattcttgtgagtctgaattacaaaatttatgtattctttttttttttttttttttttttttgagatggagtctcgcttttgtctcccaggctggagtacagtggcgccatttcggctcactgcaacctctgcctcctgggttcaagcgattctcctgcctc[133 bp omitted]acctcagcctcctaaaatgctgagattacaggcatgagccaccatgcccagcatattcataaaagtcagaattacagaaataacacatatcctcagatttaaaaaaataaaaatactacagatctgaaaagccaaatccacctcttatctcttgccccaaggccccctcctcgggaacccccgttgttggccactcggcatttcctggccttttctgtgcgttggcaaggtggctattgaggggtacctgctggttttccatttggtcgctctcccaccctgccggtcccccagccccctccctcggcacctctcctgtgggccccggcctggcgcctagtcagtgaagcaccgctcgttccgagggttccagggttgcctgtcctcgggctgttgtaccctcagctgtgctggaagcaaccacgctccttgtccatcagtgttcactggagttagggtaggttctctggaacattccagaagaggggcttgtcaggtcccaggaagggtggctgctcagtgtggcagctgagagggtgggtccttggaccccatcggcctggttcagaccagccctgcagcacccaccctgcaggtgatgtgtgtaagctcagagcgcgggtgctggcatctgcgggacggtgggttctgactgggtgctgggccccaggccctgccttcaccaagaagcctcctgtgcccagccttgccatcttcccaggctcatttcctgcctcacagcctttgcacagactccctcctctgctgggacatacccagagatgctgggcccactccctcactcggtcccgctggggcagagggcttcgcccaggcctgcctggctgcagtgctggctggtcctcagttgtgtgggtgcagagttctctcgctgtctaaggccctgtaccccaggttccagctggtgggtggcctctgagcctctgttcagtgccttcgcccaaaccccaccccagaaccctgcctgacctcaggcatagcagccatttggggcctcggctgcccccctgttcaagtgtcttcctgccttaaccccactctactttctcaggaattcacagacctcgggcaccgcctcgactgtctggacctgaaaggtgtgtgtctggctaggggttgagagcccttgggtcatgggcaggtcgggggctccctagagctgggtctgaggacctgcctggggttagcggcttctggagctgagctcagccagggcaggggctgggcctggtggggggtgggaggttgggggcagagggcccttccagccatgcaaaggtgcactgtcttagacatgcgcacggctgctgtctccccccaggtgagaagcttgactacaagacctgtgaggccctggaagaggtcttcaagaggctgcagttcaaggtcgtggacctggagcagacaaacctggatgaagatgtgagcggccctgccaccgcccacttggctccctgagctcccgggccccttcgaggtttgggtggggagaggacactgcaggaggagggggtcccctagacaaaggctgaggggtggcgcaagggcggggcctcttgcagggcaagagggagacatccaatatgaccagagtggatgtggagggcgcgttggggcacctatggcccaccctcataagcaaggagagccttagggagctgggctgaggggcaggcgtgtggcccccaggagccctttcaggaaccacgctggagggtccagctcctacagggtgggcttgggaagcattctgagagcagcctcccatcaaggcccaagggccctcacctcctcagccttgggagtccccaggcaccccaggtgtcgggatccaggggcaggggacctggagaactgaggcccaggctcaggaacaccaaggcctgtcctggtcactcagcacgtcagtcaaggactttggagggcaagtgacagaaaacaaaactgactacagcagagaaggaaagggtttgtccccgtggctcacggggccctgtctgtgcttgtcctcctctcccgtgtggctctctccagaccctggacccatcgtctctcggtggggcccggtgtcagggcccacgcctctcctccagggcagcccagagctgaggctgagcccccgaatctctatgcgcagggtgcctcggccctcttcgacatgatcgagtactacgagtcggccacccacctcaacatctccttcaacaagcacatcggcacccggggctggcaggcggccgcccacatgatgcgcaaggtgggcgcctctcggcttccaggaagaggcagctcaggctcccagcacggggaggcactttctcagggcatggcccgtaggctctgactgcatgagctcttgagtgtgggctgttgtggggatgctgggcctggccctcaggccaggagaacagggccgagaggtgtcctggcccccaggccccctggccccttctctccttgcgaggcatttcatgacctccaacttctcccttccgtaatgtcatccttctgtaatgtcatccccttggaggtggccatggtcgccatccccacgtcactcctgtgtgaaggctgggtggagggacgggacggggctatctggtaacctcccagccacacaggagttggagatcctggctgccaccagccctgcctcgctcacccacaggaccccaggctgagccttccctccccagccacagttacccccattgtaaaacaaggcgacatagccagacgacagctgtggcttcgttgctcattgagacatgggggcacaggtcctggggccagggagtgctggggcggtcctggggccagggagtgctggggcaggcctgagccagtgcctcacccctgtcctcttgcccctgcagacgagctgcctgcagtatctggacgcccgcaacacgcccctgctggaccactcggcgcccttcgtggcccgtgccctgcgcatccgcagcagcctggcagtgctgcacttggagaacgccagcctgtcggggcggcccctcatgctgctcggtgagccccaagcccgggagggtgagcaggatgtgcagcctgttggggggcaggggcctgcccagtcaccgtgccccctccccgtccccagccacggccctgaagatgaacatgaacctgcgggagctgtacctggcggacaacaagctcaacggcctgcaggactcggcccagctgggtaacctgctcaagttcaactgctccctgcagatcctggacctccggaacaaccacgtgctagactcgggtgggtgcagtggcccaccccacccacacccgtcacccagcacccactctgcccggccctgcgctaggtggtgctggggacacagacatggccaagaccaccccaacgctgtcctgctggggctcccaggaggaagacagacccgccctagacagtgacaacctagagtgggcaggactgggctggtggagcccagaggcggggtccgatcagtctgggggccagggagggcttccaggaggaggagacagctcagctgacagccgcaggatgaggcgaagtgaataattacaatctgaaaagaaagcagtgttgctgccataacagggtcagctagaggctgctttcagatgggagaggagggaagaccaccgtggggcggggcctctgggcttccatccggaggctgggagcagaaccagccttgtgagaagcctgggaaagggtccagaccgcgggagcagtgagtgcagtgggaggagctctggtgtttgatgctgggggttgagcagagaatggggagccgtcaaaggaggcgttcctgttgcatcctggaggggtggggtgggtcactgtgtccccaggtggcaggcccagaccccactctactgagcacctgccaagggccatggctgtcggcccctgggctcagctcggagggagacacagggctctgcccttgggagtttgtactccagtctagagagacaacgataagatgagtgaaatctccagcctgtcagatggtgggatctgcattggagggagacagtggtgactgtgggtgggagtgagctggctgtgaggtgaggtgggccagaggtggtcacatttgagcaaagatcagaagcatctggtggaggctgtcatccaggcacccaggcccaggggtcacagatgtgtgcccaggggtgccaggccgaggcagggctgcagggcaaggcctgggactgcggggcctccatggaggtcctaagcagagggggttgctcctaccctgcagtcccctccccaggaagcacccggaccccagacagggctctgactgccggcctcctccaggtctggcctacatctgcgagggcctcaaggagcagaggaaggggctggtgaccctggtgctgtggaacaaccagctcacgcacacaggcatggccttcctgggcatgacactggtgagtcaggctggcagggaagggaggcacctcggtccccgctgccacctcccactccagctctcagcacagttgcctctagctgacggctcctgtcctgcccatcctgcaggttcaagacgatttaaactcagccccacctgcttcctcattcagcttctgtgcctgttttccctgaggaggagcccttctttcattatctcctttttttttttgagaccgagtctcatcctgtcacccaggctggagtgcagtggcgccatctaggctcactgcagccactccagcccccgcctcctgggttcaagccattcttctgcctcagcctcccaagtagctgggactacaggtgcccgccaccccgcctagccaatttttttattttttatttttattttttttgagacggagcctcaatcgcccaggctggagtgcagtggctcgatctccgctcactgcaagccccacctcctgggttcacaccattgtcctgcctcagcctcccgagtagttggaactacaggcacccaccaccacacccagctaatttttttgtatttttttagtagagaggggatttcaccatgttagccaggatggtcgcaatctgaccttgtgatccaccctcctcggcctcccaaagtgctgggattacacgcgtgagccaccgcgcccggcctaatttttgtatttttagtacagacggggtttcaccatgttggccaggccggtcttgaactcctgacctcgagtgatcccccccacctcggcctccgaaagtattgggattatgagtgagtcaccgtgcctggttttcagtttttatgtggtgcttaaagcaagccactcaggtacagagactctcagggcgagcactcgtgtgctcaaaccccgggataagagttgccctccttgggggcttcagggcgctcaaggtccaggccctggccaggggcccaggctgtggggggtagggactgactgggtgcctggggagctgggagtggacgggggacctggcatttggggagacttcaggcacaggagggacttcaggccaggcctgcggcagggcaggacggcgccggtgttcacgcaggcgcgcgaaagaaaaggagcgcccgggcctggctctcttcccggcttctttcctgacttggcctcctgggtctcctccgccatcacggcctcctcctcaccctcacaccccctccctccagccgcacactcagagcctggagacgctgaacctgggccacaaccccatcgggaacgagggtgtgcggcacctcaagaacgggctcatcagcaaccgcagcgtgctgcgcctcgggctggcctccaccaagctcacgtgcgagggtagggtacggggccgggccagggtgcgggctggtgggctcagccgggcggccagccgggtgtggggcccgtggccagcccctgcggtgcccccccaggcgcggtggcggtggcggagttcatcgctgagagcccccgcctcctgagactggaccttcgggagaacgagatcaagacaggcgggctcatggcactgtcgttggccctcaaggtgaaccactcactgctgcgcctggacctcgaccgtgaacccaagaaagaggcggtgagcaggggacggtcctgcagccctggggcgggcggaaggccgggtggtggggccggcctgagagccctagccaggcgctcccgccacaggtgaagagcttcatcgagacgcagaaggcgctgctggccgagatccagaacggctgcaagcgcaacttggtgctggcgcgggagagggaggagaaggagcagccgccacagctgtcggcctccatgcctgagaccaccgccaccgagccccagcccgacgacgagcccgccgctggggtgcagaacggggcccccagccccgcacccagcccggactcagactcagactcggactcggatggggaggaagaggaggaagaggaaggggagagggacgagaccccctgtcctgccctggtgccccccacggactccctgggccctggggacaggagtcccccaggcagcccctccacacccaccgagcagcggatttccgtgtccagcccgggccggggccacaaggtgtttgtggtgacccgggtggagagcccgcccgagagggcagagccccctgcgtcccccacccctccctctcccccaccccctccctccccacccgcctcaccttccctaccaccagccggggccattgacacccgggacacagggtcctctgagcctcagccaccaccggagccgcctcggtcagggccaccactgcccaacggcctgaagcccgagttcgccctggcactgccccctgagccgcccccggggcctgaggtcaaggggggcagctgcggcctggagcacggtgagaggggccctagggcaggtgttgaggggccctgggtgctgtatgtgaccccaggcaagcccctgcctgttgtggacctcagtttccccctctttaaaatggttctcgcaggggccagcaaagtggggcttagttctcatctccaccctgcttcccttgggtcctgggagctcttcctggggtgggggggcatgtaaggtgtgctgccttgagcctgaccatctcagcggtctctgggcactctgcaggccctgagggtctggctggggccgggctggggacaggttgtatttgccccacccgcctgacgggggtgctggcccgtcctcccacacagaactgagctgctccaagaacgagaaggagctcgaggagctgcttctggaagccagtcaggaatccgggcaggagacactgtgacactttaggtgaggccaggcccggggcccacagcactcgggaggagctgagagagcctctggctctgacagtctctcccccaatctctcctccccaagttccctttttccggtcggtctgcgatgagctgaggccagagccatgagaatctgctcaccttccccccagccttcctgaggcccaggatgccaggggtgggggccattctggggcccccctccccccacagcaacactacaaggggtgcaggagctacagggagtggccctccgcgcgtgactcaagcacttctatttatgagcccagcactggaagactctgggggtgaatgggaggagggggagcaggaggaggaggaggtctccaaggacatcaggcgcctgttctggaggggccaggcttgccctgcggagggcaggcgtcctgggtggtggtgggatggtcccctgtggccccgggcacagggccgggcaggcagcctggtgccggagaggcggtgcgtgctggtggtggttgagatgcacagaacagccccagacagcgcaggccgggcagggtggggggatgggagcagaggatcagagctttctttttctcaagtgcaataaatctatcagggagctggggcgggagcagccggcactccgggaccctgctgtccaggccactggaggctgcgccctgagaggcactacagccctttgggggcgagtggcatgggtgtgggtgagggtgggcagagggctggggctactcctgtcggtgcaactctgttcacaccttttctaataaactggggctgggttcactttgcccaacgtctgcttcgtgcggatcctggaggtggttgctgggggtgggctgggtggaggccatcacagctcctggttacagagcatctgccagggcactggtcaggcattactgcgtcttcccccacagtcccgtctattctgcatccatgctctggtgtctcgtacggtcacctcccagccaggcgagtttacacccatcctttctgcagggagagacaggccccagatacctcctggcttcaggtctagggtctcaggatgctggatatggagtggctctgcccagtcgcccatcgctcaacaggaacagatcccagcctgtccctggcagccccaggtgttgtgcaggtgggagtatgccccgggcccagccagcactgcaggagcctggtgggcggcttgttcccctttgccagcaggggcctggggggccatgggggtgctgttgcggatttctgagaggtctgtttttccctttaggaaaggggggagcaggccgggcatggtggcccacacctgtaatcccagcactttgggaggctgaggtgggaggattgcttgaacccaggaatttgacaccagcctgggcaacatggtgaaaccccatctccatagaaaatacaaaaattagctgggtgtggtggcgtgtgcctgtagtcccagctactgaggaggctgagttgggaggatcgcttgaacccaggaggttgaggctgcagtgaggtgtgattgcaccactgcacttcagcctgggcaacagagtgagatcctgtctcaaaaaaaaaaaaaattactaaacgagcatttctgggccacccatccccttgtttcccgtgtgggaggctgacatggatggaggcgttgtggtgacatcacgagaaccacagtcgcaggctggagccctggtgtcattcagctcctgcacacaccagggagtcccctgcccccagccaccctggcctctgggaggaacaccttaggaagccactgctggtttgctgtttggtcccttgcagctgtaagtgtcctaactgctccccaggtcagccacggctaggactcttatttgggcgagggacttagggaagctacacagaacagccgccagcagcccgcagcactcttcccatccctgcacagccagcttgtccccagctctgctaatgtgcgatgtggccatgggtgaagggaagaaggggccccctcctggccactgtggatccagcccgtcttggtgaggggccggggcatgtgaggtgtttgcatcaaggtactgagagacctctgtccttcgcctggtttgggtcagcacagtgccccaacgatcttcagaggcccttggtcgatattagccgttgctcatggtctcagcctctgtggaggcagctgtgttggggtctcacccagcccgctggccgtctgcctccccaccccatgtgaggtatgctaggggagggacagggatcctcttcccagcctgtcccttgatttgctttcactaaattgagcttggagtgaggaactgggcctttcttactgttgggggttgaattgtgtctcccacaaaaaaagatgtttgtttatttatttattcatttatttattgagctggagtctcgctctgttgccaggctggagtgcagtggcgcaatctcggctcactgcaacctccgcctcccaggttcaagcaattctgctgcctcagcctcccgagtagctgggagtacaggcgtgcaccaccacgcccagctaatttttgtacttttagtagagacggggtttcaacatgttggccagaatggtctcaatctcttgacctcgtgatctgcccacctcggcctcccgaagtgctgggattacaggcgtaagccactgcgcctggccaaaaaaagatctttaaagtccttacctccagtaccccagaatgtgagctcacttagaaatagggtttttacaaaggtaatcaagttttaactcattttaatgaggtcactcgggtgggccctgctgcagtctgattggtgtccttattaaaaggggcatttgggcacagggagactgccacgtgaagacagaggatggggtgatgcctttgcaagccagggagtgcggagatggccagcaatgcaccaggagtggggagcaggcacagagagcccctccttcatctggaacttttagcctccagaagcgagagacgatacatttgtccttcaaaggcacgtggtctgttagactgtgttagagcagctctagaaaccacagccgttaccacaacaccccagcctgccgcgctcctgattttctgaagggtcccagatcgagggctggaggctgagaggatcccccttgccatcttgtcttccccttcccttcagccacccaagtgtcacccgagcttgtcacgttttggtagcctttgctgaagacgtagggggtctgtttcatgcaagatctcaatgtcctaacacaggagatgtttattgtcacatgtggatgttcagagtggcaggcagctcttcaccaagttattcctggacccaggcccctttgaagctcttagggctctgttgctccccagggcctcaaggatcccggatcaagtgggcagatgggggaagggagtggagaagggaaacctgctccctgactcattgctgggaaaggcgcacaggtcagccgtgctccttttttgttcgtgacaacggtcccgtggctttacacaggtgcaagttctcatagcagctccacgtgaagatacagtgaccaacagtttggccacagcttgtaccacgtaacagaggctgcggcttttttttttaatcagtcggagtcttgctctgtcgcccaggctggagtgcagtggcaccatcttggctccagccaccacctcccgggttcaagtgatcctcccacctcagcctcctgagtagctgggattacaggcatgcaccaccatgcccagctaatctttttgtatttttattagagacagggcttcaccatgttggccaggctgatgcagcttcttactgaggcatggggggcttcagtcctgccctcacctccagccaagtctacacgttagcatctctcacagcaccccactcctggtaacaggagtgaaaatttattttcagcttggattccaggtggtaagaaacaaacccaactgaaactggcttaagggaggctacagggatatattgaccccaaccacacatctacagaaacagacttaacggtgtcacgaggccccatccttctccctctgaggccagctctccctgactgctgggaaacagctcccaggaggtccaggcgtatcctaccagcttagtcagtccaggaatgggaaacagcacctctgcttgcccagccccagggaagatcatagagggctcccactgacctgcatgcacctgtgacaattgctgtggccagagaactccggtgctgcagccagacctggatgctatgcccagccttggaactaaagaactgtgaggtcagtgacccagtcccatggcctgagggtgtgtgcctttgcagagctctcaggttcctcgggggctgtcccctccaccagcctcagggccctggctcagaagccacaccctcagcctcatcccagggtatgttcagtgttggcccttgtggcccctgccggcacacacttggaactgggccaggcaccccagggcctgagcgtgtggctgaacatttgaccagtgaggaatcaggaactgcccagaggagtgacacccacccccagcccagggctctgcccagagggaaagtgggggagccctagtgtaacccctcctggctggctgtggcttgggccctgtatgtccccatctctgcccaacttccctgtcctcatcagggggctgatgcagtggcttcagtgtcagtgactaaccagtggccctggagtgactcgtaaggcaggtaccctgtggacagttatttgtctgggggaggttagtgccacccactccagctggctgaggtgccagcgaggtctaacccattacgttgagaatggagccaccctaggggtggagcagcttgctgaggtcaccgaggtcatcctcagaaatgccagcccctgccctactcacagaggggcaagctagggcatggggacaaggactgggattccctgaggcctgggcgctccatgttgcctgagtcaacctggcccatccacctgtcatctctgcagcctcacccaccacccccgcagcctctcctgccacagagatgccagatgaggaggccagcatggtgcagaggagtaagtgggcttagcaggatggggcaggccctgtggcaggacggggcaggcctggtccctggtcagatcaggatgcggagagcaactccgggctctcaacacctccatttattgcatgtataccctgacttcctcactggtccttctgtgcctgctctcatgctggcaccggcttgtggccgcactccttggaagctatgtccacggctctggctcaggttcacctgggggtgtgggcctcacagggctcattcggaccctgggttgcggccccagtccagccccctattctcccatctgggcagatggaggaacccttgcctcctgctgcccgccaagtcctccatttaaggcccacctgggctggattgccctggacggaagagcgcacaggccaccggccatagcttgcccctgtgggccaagtccccagtgtggtggccttcgccggcttgccctgaggcacggcccgacgggggcgccctggaggcgctgttggcccggtgggcagcgtggggggtatcgcgggtaggggacttgggcgggctgggcggcttgagcgcgctgacggctcggatgagacccatgcgccggcggatggagtggtccaggttgaccgtgcagcgcagcaggctctgcgcctcggccacggtgaaggggaagtcggcgcccaggaagcgctcgaagagctcggggtcgccgtccaggtcgagcacgttctgcaacgccttggtcatggtgtgcagctcgcggctgttgtcgcggaaaacgtcccagaggcgcgcgcggccctcgggcgcgcccccggtctgctgccggtcctccaggcactgcagcgcccagctcaggcggcacggccactggttggcgagcaccacccacgccaccgcctggcgcggcgtggggcccccaaagtccccctgctgctgctgctgctgcagcaggcgcacggtgatgggcacggtgttgacgatgcgccgcatggacaccacgttgtcgggcacgtactcgtagaggcagtcgcgctcgtcgtgaaggcagaagagcgcctcctggattcgccgcgccgcctcgtcgtcgatgcggccctgcccgcgctccgtccccgcctgcgcctgcaccgccagcagctgcgcgctctcgcccccggcgtcccccggcagccacggcttgcgcgtcatctcgcggtacaacaggtcgtcgcggctctgcaccgcatcgtgcaggaactgcagcttggtgcggcggcccataatgggcacagagaagggcagcgtgacagtgcggttgaggaagaggtagccgttatcggccgtgcccttcatgttgcccgcgctctctaggcacgcggccaggatgctggggtccacgaccaggatgaagatgaagggcgcgtggctgtcggacagcagcgtgttgatggcgttgagcacgcccaccacgcgctccgggtagcacgtgtccagcccggtgacctccagcaccacgcgcagcctgcgccgctggtagatctccaggaagcacaggaagtcggtgagcagctccacctccttcttcacctcgcacatgaaacccagctggctgccgaacttttcacgcgacaccagccgctcgatcttcttgcgctggcttacgaacaggtgcttgcccaccgagtacacggccatgagcagccccgagcccgacagtgtggtggccgcgccgccaaacaccttgagcaggctgccgctcgggctgccgtggcccagcgcgtggccgcccagtgacaagtagagcagccccacacccaggcccagcgccgccagcagcgccagcagccccaggcacacgcggcgccgacaatgccactcgctctggcagcagtcctgcctggtggccggcttgttgcccagcaccgagtacacgctgaagggcagtgcgccatagtggcggcggatgccctcgcacaacgtggtcaccaggccggcccacagcttgtcggtgcccgcgtactgccaggcgctaaagcggatgaaaaggaactgcacgttcctgcgccgcaggtgcacctcggtgatgatgggctgcaggaacaccaggtaccacagtagctgcgggacgccccagccgctcacggcacgcggccgccactgcacgtgctgcagctcctcgctctcgcgctgcgcggcctcctgctgcatcagcgctgcgggaagggagcccgggagccgcgtgagccgcagacccgccggggtgggcggggcctagtacgggcagggcggagcgctcctggagaggcgaggggcgcccagcagaggcgaggggctggaagcgagccgcggccgctccttaaagagctggaagccggtgcagaagcgggggcgtggagaggcctggagccgggcttggaccggaagcggtctgaaggccaggctgtggggtcgggatgggcagaggtagagccggcagaggagagatgggaggaggcaaaaagagatacgaggaagagccagggatgggcaagaggctggaggcggagcgagggtgtggagggcaccgggaaggttctgagagtggggcaggggacaagtggtcggtgtaagggatgaatgaatgagatgctgaggaggagctatgctaggcagcaggatacaccctcggtcttatcttgttgacttaactgctcctcctgcaggaagccctccctgatccccaggctgggtcgggggccctcagccattcctactctgggtcatcactgtctgaggacaagtctctctcccctgctggactgtgagccggaagggcagggtcctgcttgtcttggtcaccgtgtcccctgggcaccagaaggtgcttagggaatgcctgaacaatagatcatgagaaatctgaggtcacagagtgaatgagcgggagtgtctacagcacccagcaggaggagtagggactctctgttctttatatcctcttctcctcccgggaccctgtgacaacacaggacaggacagtgagtgctcaatggacagtcagtacaggaaggaaaggctattgggcctgcaccagggctgggcacacgtaggaggaacgtcagtcccagcccctctggccccacgtggggctgaggtctgagctccagcagggcttgatccagatcaaagctgctggggaggccagtcgcggtgagtcacgcctgtaatctcagcactttttgggaggccgaggtgggcggatcacatgaggtcaggagttcaagaccagcctggccaacacggtgaaaccccatcgctactaaaaatacaaaaattagccgggcttggtggtgggcacctgtagtcccagctacttgggaggctgaggcaggagaatcgcttgaacctgggaggtggaggctgcactgagttgagactgcgccactgcagtacagcctgggcgacagagtgagactccatttaaaaaaaaaaaaaaaaaaaaggccaggtgcagtggctcatgtgtaatcccagcactttgggaggctgaggcggatcacatgaggtcaagagatcgagaccatctggccaacatggtaaaaccccgtctactaaaaatacaaaaaattagctgggcgtggtggtgagcgcctgtaatcccagctacttgggaggctgaggcaggagagtcacttgaacccgggaggcggaggttgcagtgagccaagatcgcaccattgcactccagcctggagacagagcaagattccgtctcaaaaaaaaaaagctgctggggaacctggcgggttgcagttcatgtcttcagttggcatctatgtatcaggtactttgtgaccaccaagccttaagaggtgggtctgggtggcacagaggccagtaggggcttggcaggagcctgcagcctcaataaagagcctgggctttctgcctcaggtgctggggagcatggaaggcaccaagcacaggagggacagggtcagatctgtccttcagaaagagtccttggagtggatttggtggcagaagcagggaagggtaaaacttgggggcagccaggaggccagagaagcagagcccggggtagaggcatgggcttggggagggcctgggctggggcaggctggccacaggggtggggggatctgggggaagcctggagctgggcggggaccagaggccctgtttctcatcctccccccaacaaacacacacagctcctcacccgtgatcttgtccagcatcatgtgcaggcggcagccgaaaggggcatagaaacccacggtcacagggaccggcacgtggcagagtgtcttggccaggcagctgcagtagacgtcatcctctgtcaggatgtctggtggttgggagtggggacactgagtcaggaccactggccaggcaccaccctcctcccatctgccctccatggcccccactatcagccccttcctggcaccctgtgcaaaggggactcaggtcaaaccctgcagtggaggtttctgtggccatcagtggccctcacctccagggcgagctgtgcccctttgggtcccaccaggctgaggctgggaggctggaatccccccagccacacaccagaggctgaggctgcgggaagtcagctttcctggccctaggtcaccaggcttgcttggtcactagcccgtgattcccccggggaaaatcccaaaggcctttatttgggatacgaggccctcagatgccaagacaccactttccaccatcagcaggactccaggccactcctgcctgctctgctggcccggccagagcatggagaggccctgggccgcaggctcctcccaccgtcctgtccatcatgctggcaagtcactaatcccacctgagcccagggttgggagagagatgaccagactggagctccagtcccagccccaccgcctttgtctgcagaccccagggagagccacctctgagaggctcatttccctctgaagagtggggcagcagagacaccagggagcaggaatgccaaagggtctggccagcgccgggcccttggtcaatgtcatggtctccagtggccatttagggccctggggaccaggcactggcactacggcatccactctgcagagggcaccctgtcccccagtgagggttgcttcttggacctggaaatggggtatcaaaaaggtagggttcagtcttggggggacacatggggccagctttgtggtgcacagtgggggtaacacagccactttcagagaggcctggtgggctgtaggaaacgggccacacctggcggcagagccaggaggccaggaagcagactcaggagtagttctactgaggtgtgggtaggcgggtctaattccagctctgccagatcactgggtggccccacctcatccaccctctacttccctgtgtgtgaaatagacatcgtagccctgaggctccggtgacagggctgtgcccgacctaaagtccctgttgctctactttcaatccagacctggaaacccagccgtctccacctctgctgccgccaccccggcaaggctgccgcacctctcgcctggatttttgcaatctcctgctccctcggccacctgcttccgtcctcctcccatagcccattctcctggagatcctgtcagctcacatccatcctcggctcctgcctcctttgggcaaaagccgaagtactggctccttgctggcccgggaacatgcctcctcagggtctctgctcaaacgctgccttaatgaggcccagcctgacaacccgatttaaatctgcaaaccctgacatcccccatctcctgtccctgctttatttttacctagtgtggttgttaccgagtggcatacttttcgaggcaaggtcttgctctgtcacccaggctggagtgcagcggcacaattataagtcactgcagcctcgaactctggggctcaagggatcctccttcttcagcctcccatgtggctgggaccacaggcgtgcatcactatgctgggctaattttttattttatcttttgtagatacagggcataactatgctgcccaggctggtctggaactcctggcctcaagcgatcctcctgcctcag[135 bp omitted]acctctacctcccggtttcaagtgattctcgtgcctcagcctcctgagtaactgggattacacgcgccagccaccacacctggctaatgtttgtacttttagtagagatagggttgtaccatgttggccaggctggtctcaaacccctgacctcaggtgatccaccagcttcagcctcccaaagtgctgggattacaggcatgagccactgcacctggcctcccagccacttttaaatttccatgtttcctgtacctgcccccggctgcaatgcaatgtgagccccatgaagacaagagatgtctgttgatcccactccccactgtgcccctagaacagggtctggcacgctcagggtgctggatacctagtcatggagtgaatgagggagggagagagcaagcaagtgggtcttcccattgctgacctttgctctccgttccccaggctactccctagctctgtcttccccaacgccagagccagccaacaacccagggctcaccatccctgccccatgtaccctgtaccctgctgagccagaggagggagctgagaagagaccagagcagagccagggtgtcggcagagggaaagggggaaggagagggaggccttcactgcctggcgcaggatggaggcacggggcaggcctggcctggaagccttggaccccaacaggcaaagctgaggcagccagcctgagccccatggccagggacgcacccctcctagatagggaacagggtgtggatgaagagggcaggtgcaagatgctaggcagggagcaaggagagcaggtgggaagtgaggcggcaggagtggggacagggcccccaagaaggccagggtgagcaccggagctgtaggcagtgaaggagccacaggccgctggggcgggcaggggccgggcatcagtgggctcgctgggcttcaggaggacgccagccgcggagggtagagctgggccactcctggccatggctggtgccgtggtgggtaaggtgggcgcctgaggggcgctggcaggttccttggggacagtggaggttgcaggcagccccttctgggcttcgtgaatggggcagagccgctgccgcagggggctgggaggtgagggctgggactggggctgccgctgctgctgcaggacggagggcaggaggccccggcgccagccactgccacccacttggtggctgtggtaggccagctgccagtgtgattggggggaaggccgacagggcccatgggctcggagggccgctgagtcctggcgccactgatgacagcatcctggaaggaaggaagtgggggtgactgggcctgtgtccccgacccccgggggcaccggcacaagccagaccaagtcttcaggtagaacctgggggccagagtattcttgggagccccagaaacccctcaaaaagtaagattatgtgcgggggaggtatgggcaggggagggacccagggtctgtgctgtcccatggcgggggagcagggaaggtgcaggcttggacttcagctgggggcagagagaggacgcctgaggttggggcttcaatggaggctggtgcctgccacagcagattcctggatccctggggggtgccgccagtgcaggggtcagggaaactgagaagatccattgggagctggccctggctggcccagggaggccggagtgatgggtggtggcgtggagaggggtaggccagggatttgggtggggggtggaccttgtccccagctcgggccagggtggcaggaagggtggtgacctgggaagctccagccctcgccctagccctgaggaggctgaatcagccccagtgggagggcactgccccctccccaccctgaacaagatcacctgtggtcaccaccagaaactgggcccagcctcatccagacatgttcagtgggggggctccctctcctacccctcactcccagcacactgctcccctccaggctggaggccatccacacaggcctcagggtttggaaacggggcagggcaggccaggcggcccctgcttccaactccagcccaggctcctatctttgggcccgcaggccctgtggtccgggtcctgggtcccaggccctgctgctacacagatgcctctgggtggagtgcaagtggcttttctctcctggggatgacagctccccttctgttcctccattcactctggcttcctcacaggcctctgtcggccatcacccgcccccaaactgaacccgtaccttttcggtgccccaactctgggtcccagaagtagtgcccgttggggctctgggcatccttggcgaagtggactttgtaatgtttgtgcatggcagccgggcagctgggtgctgggggcctgctcctgaggcaggagggagcacacaggcttggcgtagcctctggggcacgaacagcagagagctgaggtcagggtccctgccctgcccgacagcttggacaggggaaaggccaagtcccagatgctgggttcctaggtcacttgggagaagggggtagaggtggccttcagggtacagtgaggggcaggataaggagggatggccagaggagggaacggagaaccgctggggttggctaggggttaatttgaggctgggtgttgggaagctcctgggagtttccaagaggctaggacactggggagtgctgagcagacatgggctggggaaatagggggtccggtgtggtggctgagtgaccaaggggtcattaaggtgtgggcgctgtgggaggctggcacgctttggaaggacatggagctagtgaggtgagctggagagcagatgagaagcagggtgagtgaaaatcagagctgggtacctgtgggcattgaatgatacggtggagggggaattgtgagggagcaatgaaatcgcggtggtccaatttggggagaggctcagcaaactcgggcaagatgggtgtaccgcgtttccaatgtgaagagccgaaagcaggacagggaaggatgctgtgtgggggacagggatagggaaaggctgaggggcagaggaaactggggtgctgagagttggtagcctgcccaccactccccacccccagtcccagtcccactcgtacctgacggtggcctcacggccccagctgcctgccccacgagcagctgccacaccagcccggactgtcagcgcaggcccatccagatggaggcctcagcccagtgcccgcctgaccggtttgcctgcctgtccccgccccttccccagcgcctgcctgtcccagtgctctctgctctcgaggactgggactccgactggactcagtcttgtgtccccatccctggtaaggaacggagatgcatcccgcagcactgcctcaatctccttaaggcagccacaggcccaggcacttctgctggtgtgggggggacagggagctgggatgccagctcctccgtggcccaggtatgtgaccttgggcaggtgacttcactctccgagccatggcttcctcattgctgagtgggcacctgcctctcgtggctgtcgcgagggaggcactgggtgggagtcccctcagctcagggcctggcgcacctgacccggggctgtgctgacccatttacctggcgctgttctaaatggatgtccataggacaagggcaacagcacacacatcaaggcttgctacaccatagccccgtcttcctctccaccacccagggggccaggtgtgatgcccgcttcacagatgaggacactgaggcccagagaagtgaagtcctcggccccagggcacacagaggcagggcggggatttggaagcagtcagtggttgctactcccaggctcgccaaggctctgtctcctgccctcggggccagcactcagtgactgcctccccacagatgccctctgaggggtgagggccggggtaaggctgggcaggagatgccctgaaggcccctcggctctctggggccccggctccctgtggctgctggcgtaacggggtcaacagttgcttccctgacagacggggtgctccgatggggatgggggaggcagccccagaacagtgcccaggacaagataaagggaacccacccagccctgagttctgcccaggtgaccaaacactgctccctacggccagagccagggcccttcctgcgacctgggaccccgtctcctcccccacccttcaagccggttgctctgggaaggttcctccctggcccaccagggaggcggggctggcatctgagcgtgggcatctgcagtgggcctccgtgccaaccccccacacccccggcccgatcatgaagcgtggcccaatgtaaatgagccgtctccgcaggacgagattgccccgggctgggagcacagtggccaggaggctgctggacactagggggagcaggcgtttggggagtgggccaggcgggcagcactgcagaggcagacacaggacacagctacactcagccaggtggaataggaaggggtgacccaggcagggcctgacggggtgactggaccccactctacaggggaggttctttagcaaggggcccctttctcatcccatttggggttcacccccagccttggtgggcagctctgagcctggggcacttacccatgtcaggcagcgggcggcgaagcccaggagtccccagatgctacagatgcgagcggggtgggagggggcagcataagggccactctgcccagggacgggcagcaggagtgcgtaggggccgcgtgtgtccatgggggtgtctggcctccccctaccccatgcatccccagccctggcagccccagcccgacctggcctacactccgggcactcccagccctgctccccaggaagacgctccgttctgtgcacatcgccgggcagagggcagccccagacttgttgacttggcagaggtgccagtaaggccgcccatgccggaggccagcatccctctgccaggagcacggggagggagggagtggagggggacgtggcaggggagggaaggtctgaggggcatgggagccagagagggtacccactcccctgcaggacctgtgacagtcggtccacagatcctcccccactgctctgagtcagattccacacacacagcctttattgagcagctactgggcagtgacgctgccgaggcgggaatcccaccacagtcctgaccgcagctgggacccctttgcctcctctgacacccccacctcaatttgatacccacttcctgagcaaatgtgacccctagggcctgggattcccaagaccaccccgaaatgcagcggccccaccgtctcctgaggccggtgaggccaggggcagcagtgcggctcagcaggtgcgaggcaggcttaggatttcggaatcaccacctggaacttacctggaagagaaggcctggcttaggcttgaggatgggatgggggaggcagagggcacctggacggctcttaggcgctcacccccgtcctgcactgacaccccagtggctaggttgggctgtttcctcccgcccacggggccgcatccctgagctgtgtgagtaaccaggagcatgagggccacggatgtggccccagggaagcgcccggcacgggcttctgtggtatgcattgctcggtcctaccccacgggggccccgggggcccccatgagtgggcctggggaaccggcagaggcaaaataactgaaggtgggggaggtggtggggcaggctgtccccaggcaggaatggggctccagcttgtctgacagaggacacccagtcaggcaggctgcaagttccctggagcctgccgtcgcccccatcgaaggatcagtgaggataacttctattgcgtccacctcggctcccatgctgggaaacgatgttcaaaaccgccagacagttctctctgcagggctggcgacgtcacggagccaggggcacagatgggcctgcaccagccgtgtggctgagcaggtgacttaaaactgggcctgcctcccaggcacacacacaggagtggggctggaactctgaagcccccagcaactcaagggatgagaagaatccccccaccccccatgactcacagacgggcagggctgccacggaggcggtgaccacgctctcaatgcccagggtatagagggcgccgcgcaggaggccgcaggtgaaggccaggaactgaggagggaacacagaccagcatgggaagagaggggaggccagcacccgaggtctggggcaccccttaggcctggggaaaggcctgatgtgggatggggctgggtaaacaggaggaagggaggtgtggacaaggccccagctccccccataccttgggtgcttcctccagatactgcaggccagaggccatcgggaggaggagggggaagctgttgtcttgcaggacgtaggtcccctgggggagaggagaggctggtgggtggggtcggggcctgtacatttgaagcgcagggagggtaagcaggaacccaggtcttagattgggctgaggttgggaaggcccccttcctgagaaccactggagtcacagccttggcctccagtgctctggtagggcccagggcttccaaacttggagtgggtgcctgtgccctggggagtgtgggtcctgccctcgcctcccagggttgtgcagaaaagctggggacccggcccaggaagatgcagaagggcaggtacagcctgggtgtcactgggggactagaccagcttgggacaagcagcatcacactgggggtagggcaggcagccaccaggggctttctgcccatgcatggctcactcctggtaggctggagaagttccggaaacaccccctatgccccagcgcagcctcctggcttcccttagaggatcagacagagcaagagctgcggccgcctgtgggaaagctctgggcgggtcccggcagccgctgctctggcgccgggggattcccctcccactctcttggtcttgccctcaggaggaagctggacgggcaggccggggtgctcccacctggtgattggtgcgcaggctgtccatctgcttctggaacaccgccacccacaggtctttgcacaagaacttgaggacatccagctcctccctgaaggccagcgtctcccggggcagcctggtggggcagtaccaagctgaggccgtggggccaggccaggaagagggaggaagacaggcccgactcctgcatggagcaatgcaaccctccccgcccggggcctgcccagccctgccagccaggctgggggagagcaggaggggccgcgctcacctctcgcctagagcctggcccacacggaaccccataccctccaggaccgacaggctcatcttctgtccctagaaggccaggggagagatgctcaggggcccttagccaccacgaacccggggccacccagggggggacctgccaggggacccaaagaccaacttgctggtgctcgtcagttcaggggtgagcagggaggggctctggcacagcccggccagggcaggggcaggcctctagggtgctggggctccctcacccacctctgcagaccttgcaggctctctggatccccagatcatcagcccccaagaaccagctcccccttccctcaggaacaatgggggtcttccccaggctcccttcctcctccatgacttttcctgataacccccatgacaggctgcacgtgctttcagcgcgaaccctcacaatgccctgggaagtgggcgctgcgactccaccaagatgctccaggtgacctgcccaagggctggaggctgggccacaggaaagggggctgtggaagtcaaccatgatcatcatgccttataatattggccaagatccctggggaacacgtggaagctcgggacaggcagatcttcgtttgggtgctcgaaaaggacagtggctgccatgtagtgtctggagggtaggccagggtccatacaggaggggactgtgctggcagaggcaggccccaggtaggagggctgcactcggtgtctgtccacgtgcctgtgtgtgtggagggcatggctggaggagaggagatgctcatggatttttttttttttaagagatggagtctagcttcattgcccaggctggaatgcagtggcccaatctctgactcactgcaacctccgcctcccgggttctagcaattctcctgcctcagcctccagagtagctgggactacagggatacgccaccacaccctactaattttttgtatttcattagagacagggtttcactgtgttgcc[134 bp omitted]tagagtgcagtggtgcaatgctggctcactgcaacctccgcctcccgggttcaaacaattctcctgcctcagcctcccgagtagctgggattacaggcctgtgtgccaccacacccggctaatttttgtatttttggtagagatggggtttcaccatgttggccaggctggtctcaaactcctagcctcaagtgatccgcccgccttggcctcccaaagtgctgggattacaggcaaaagccactgcacctggccatggatctttttttttttttttttcattcgggtgttttgctgcaagcagaggaagggaggaggcccagactggggggcaccagaaatcccaggacggctggggcgtgaggcgccaggtttttcagagaaagcctggcagagcagaagtgggggaacagaggcggcaggtgtgcagccctgagctgaaggaagctcaccctcccgctggctgctctcaggagcctgcagtcaccaggcctgagccctgcagccctccctctcctgcccttgacccccaccttcccttgggaatggcagctaccgcctcctccctccagggctgcaccatcagcgcagccatccgaatggggatgcgaattctctgcttggctccagccctggagcgggtctcccagcctggagagcgtgtccgaggaaggcttcttgcagcctgcgggcccagctgcctccatccctccctcaccctctcctctgccccctgaggacattcgctcagacttctgagcctttgtaccgacttccttcccttcctccctcccagcttgcgtccccagccctgcccactgcacactgtccctggatgaggacacagctctgtgaaggtggggacccaggctgaccaattcacatccggccttcagcagccaacacagagcttggcatgtgggtggtgcttaacagactggctgatgagacaacgtgcatcaacaaaggacaccgtaagtccttacctaatgctgtcaacaggctcttggaaactatggctttaagcaaaatgacatatgatgaaaccaatttcacgcaggttaattaacataaacaagagtgaagttccaatgccatatttctggtacaaacacatcaccaaacttctaaataaggatgaaaacacttgaaatattaaacactgaaataaatgtgagctatacatacgtttaagaaagattaggccgggcgcagtggctcactcctgtaattccagcactttgggaggtcggagtttcgctcttgttgcccaggctggagtgcaacggcgcgatctcagctcaccacaacctctgcctcccgggttcaagtgaatctcctgcctcagcctccccagtagctgggattacaggcatgagccaccacgcccggttaattttgtatttttagtagagacagggtttctt[135 bp omitted]tggcgaaaccccttctctacaaaaaatacaaaagttagccaggtgtggtggcatgcacccgtgtcccagctacttgggaagctgaggcaggaggatcatctgagcccaggaggtcgctactgcagtgagc[140 bp omitted]tccgcctcccgggttcacgccattctcctgcctcagcctcctgagtagctggcactataggcacccgccaccacgcccagctaatttttttgtatttttagcagggacggggtttcaccatgttagccaggatggtcttgatctcctgacctcgtgattcacccacctcggcctcccaaagtgctgggattataggcgtgagccaccgcgcccggccctgaccctgtcttaaaaaataaataaaaaacaaaaaaccagtaagacatttactcgcttcctccagctcagggtcctgggtggccagagcccgtcctggcagggccaaaagcaggaatggaccctggacagaacgccatcccatcacagggcgcacacgggcccacactcactcacactgggcccacggagacccgggagctcacccagcggacacatcccaaggatgcacaaggaaaggagagcccagaggaacttgcaccagcacagggagaacccacaaccaccacccagacaatggtcccgggaatcattattttttcctcatcaatgtcacaacaaaatgttattccaggaccggcatactgtgtggcaggcgttttctacagccttcttgttttacctttccagcctcacagaaggctgtaattccaggtggaaacaggggctctgaggttaagaagaacccatccaaggcaccctcagcacgggactgtctttcacaccccagcaggtccagataggagggtgggtggggtgacagccatggctgttgagggcctcacggaggtgaggagcgctgggaatggcgggggggcctgagctgaggtcgcccatatctgaagccaaggtggcccttcctctgcctggccccttgccaggcctcgccctcatgggtgacaacgacacggcttcctgttgcactgtctccctctggtgtcaccatctgctttcctccagtgtcctcaggcacagcagggccggccacacagcagaggctcatggaaggggccgatgactgcaggagacgggcaggtgtgtgtgagagacagagtgggaagagacccctgcccgtgggtccttcatggcagcactaccagcggcgcaggtgcagagccaccgcctgggtccagatccgccccagcacttaccagtgtgggacctgggccaatggctgaatacctgtgcctcagtttcctcatgtaaaaaagagggtcattttgtttgtttttgagatagggtctcattctgtcacccaggctggagtgcaatggcacgatcttggctcactgcagcctctacctcctgggttcaggtgatcctcctacctctgcctcccaagtagctgggactacaggtgtgagccactgcgtccagcccaaaggaggggaatattaatggcagctacctccaggatcctcacaaggagtaagggttggtaaaggcaacctgagtacttcaaggcagttccgggagccttacttattgcattcacagcctccacatctgtcaaacaaggagacggccccagccaatgagggatgaagcccttggctggaggagaaccccaggaaggaagggggtctgttctgtgggctcctgtagccagcacctagaacagcccgggcgagagctcgctgcctggtagctgcggctcccgtgtcacctcctcccacagcgaagctcctggaggcagggcccaggctgcactctgagggaacacgtctgtgtccacagcaaagctcccagaggcagggccaggctgcactctggtggaacacgtctgtgtccccactcgctaagggctcctttatgtccctccctcattcatgccacagacatttcctagtgtcctccaggagctcacctaccttgcctggcagggttgacaggtgcccaaatgatgccaactgacaatctgggaagggctgggagactgagtgcaaggggcccgggcagtgcagtgcagagcctgccctccaggagggggccggaggtggcaggtattccaagcaaagggcatgtgccaaggcaggggtgagaggcggggaagggaaggggccctcagagtgggctgcagagggggcattttcccctgcaggcaagtgcagccaacctgagggtcaacgcaggccacgttgcctgaatgccagccacagtgggccacagactcagtccctgccctgctggagctggcgtttcacccggggaatgggcaaaggtgcaatggccggcttcactatgctcacagcgactgccaagagggaggcaggtgtgctgcgagggtgcactcccacccctaggaagcaccccgactgtgctgagcctgagggaagagggggagttcaacagcaggagtgggctgtgaaggcacaccaggcccaggtcacagccaggacggcagcccccggaggggtgagctgggggagagagtcagcagggtccttcagccaggccaggagcgtggagtctgaaggggttccagcaagttcagcttttcccttcatgaacttcacactgcctgggtttgaatctcggccccgccactcactggctctgtgaccttgggcagattagccaaccatcccgtgcctcagtttccccacatgtgccatggggctaatggcagtacctgctcacagtggtggtgtgactggcaggtggcaacagctggatacacggctgtgtgactgctggccccactgtacccagccctggacaggggccattcagatcctggctgaactgaaaagggctgtggggaatcacagcaaaagggaggggccgaggaggagcaggaggcagggaagaaagggcggaggaggaagggagaagcctccacccacctcatcacagcgagacctggtggtgtccatgcccatgtcactgcaaaagctcttcagaggttaggggtttatctttcttaaaaacagaaggggctgggcgcgggggctcttgcctgtaatcccagcactttgggaagccaaggcgggaggatcacttgaggttaggagtttgagaccagcctggccaacatggcaaaaccctgtctctactgaaaatacaaaaattagccgggcgtggtggcgcacgcctataatcccagctattcaggaggctgagccaccaggatcgcttgaacccgggaggcagaggtttcagtgagctgagatcacaccaacacattccagcctgggtgacagagcgagactcagtcacaaaacaaaacaaaacaaaacaaaacaaaacaaaacagaagggctggccagacagagactctcccattcatatgaatctgccagagcccagcccagagccggtgcatttctggggctccccacgcctgcctctgctgagtttacacacagaccggatgaaaggaaaggtggaagggaagtcttatcagtgtcggtgctaatgacatccaccacacaggaaggatcaatcagacacaaagcagagttcctggaaatgaacaaatatggtggccaaaatcaacactttttaacaagggaactgaataacagagaaacctgtaagacagataacacctcccagaagaaaaacaggagggaggaaaaaatgagagaaaagctacaggatgcttggaagagatgcaggaagtctaatattccctgtggtgcctacaggacatacagggaacgatgcaggagaagaaatcatcagagagatcacaggagaaaaatgtcctgagctaaaggaagattcacacgtccagactgaagccaaggggttgagctccaaggaggatgaacggaaaaagcaaaccaaagcccctttagacacttgggagctcctggtctcagacaatgggtgacagcgccttagctctttactacatgcactcaggggaatcctctctttgcccaaaggcttcccttgtcttcaaagcctctgaggtagaaaagccacggctgcttcctccaagggcttctcctccttagagaacaaaggccttcctggcccctctggccggtcctccagttcacaacctgtgacagcccaggagaatggccacaaataaccaccgtaccaggcaggataggaggtcacaaaagccctacacactggctgtggctcctgggcacctgtgctgtggggacagagatgaaggagccaccatccctgtcctcaaggagctctgaagctggtgggaaaggcggcctgtgctacccagaagccctggggccagaagcctgagttctaattttgcctttaagagaacattctgccctgaactgggagggaggcgggtgggggccatgtgctccaccccttcctgtctcttgtgtctgccctacccctcgattgttctctaggcacctgctagctcctgggcagaggctgaccctgttcaacgcccacctgctgagccactctgtgccaggcccaggggtgtggtggggaacccagggaaggagcagccctggttaagaaaagcacacagacagaagtgctggcacacagatgggtgagtgaggggtgggtgcgagaagcctgcaggacttccctgctgttgccctcaactctcctccctggtccagcaaggcatcctgagcaagtccagatcctgcctctgcccactcagaactccccatcctgtcccctggcccagcccggaaggttgagcccaccacagcctctgccttaagctcctgcaacagcggggcccttcccaggccaatctccatccagtccattcctgtggccagggagacatttctagaatgtaaatctgagccaggcgcacctcagtttaaacccggctatggctcccactgccttcgggatggagccccagttcccaggagggcctcgctggagctcccagccacagatgctcaggacggtgttccgggcagggacctatctgacagccgctccgcccgccccacaccctcctcagataaggggctgcccaagtgcactctcggggtgtggtggatggaggcctggcgcagcagggctattctcggggcgcctcgggcctggtctcagacaatgggtgacagcgccttagctctttactacatgcactcaggggaatcctctctttgcccaaaggcttcccttgtcttcaaagcctctgaggtagaaaagccacggctgcttcctccaagggcttctcctccttagagaacaaaggccttcctggcccctctggccggtcctccagttcacaacctgtgacagcccaggagaatggccacaaataaccaccgtaccaggcaggataggaggtcacaaaagccctacacactggctgtggctcctgggcacctgtgctgtggggacagagatgaaggagccaccatccctgtcctcaaggagctctgaagctggtgggaaaggcggcctgcgctacccagaagccctggggccagaagcctgagttctaattttgcctttgagtcttgctgaaccacctcgaaatcccttcctctaccaagcacagggtccctcctctgtgaatcgggagggctgtcctgaggactaaatgcagtcaacactgtgcaagtactgcacagacgccctcaggaaacgggaggcctgtctggttcagaggaacccttttgggccaaagagaaggaatggagagaggaggtggggccaataaagagaaaggactgaggaagccgtttctcatgacaggccccctgaaaaacggggctccccaggaggaaggagtgaggggaaacgatgcagttctcacccctagctgcagcgagagccacctgggagctttctgaggcctgacactcaggcctcaccccaaccgggttcgtcagagtctctggtgtgggactccagcatcggaatgtagtggcagctgggtagggaacccctgcccaaggtcccaggcacattcgtgtgctctgaaaggctggtggtgagcagagctgagtaagccagtttcccacactcgcttgaccacagaaacccattaaaatccttcccagggcaaatgctgggaaatgcaagtgagagtttacagcacaggctttggaagtgggaggcctggtcgcgctcctgactctgccacttgagagcaaggaactccgtccatcaaagcctccgccgcctcatctgtaaatcggggaggaccatgccaacctctctgggtcatcagaagatcaaatgaaatcaagagtgagaagccatgagtgcacacaggaagcactcatatgaggggagggagggaagagctagcactgctcataagccaaatgaatcccagtccccacccatccccacctgccacggcacaggctctgcattcacctcctcaacacgtccacactgaggacccactacgagccaggacatccagtggtcatcaatacacacccaggcccatcccgcacaaagtacactccggctgggggagacgcatgtgaattaaaggatcatacagatacacaattcagacgcatcctggcagggcgtgctggctcacacctgtaatcccaggtgtgagtttttgggaggctgaggccagaggatcgcttgggcccaggagttcaaggtcagcctgggcaacattgtgaaaacctatctctacaaaaaatttaaaaattagcagggtatggttgtgtgcacctgtactcctagctactcaggaggctgaggtgggaggatcacttgagcccaggagtgtgaggctacagtgaactatgatcatgctactgcactcc[224 bp omitted]aggccaaggcaggcagatcacaaggtcaggagatcgagaccatcatggctaacacagtgaaactctgtctctactaaaaatacaaaaaattagccgggcgtg[346 bp omitted]agcctaccaagaaaaaagtgcgagagggagaccaggagaatgtataaaggagatccaaatttgactgggggctcagggaaggcatccctgaggaagggattgttacgctaagatctgaaggattaatagttgttagcatggtgaagatgtgacaggtggaatgggctgggagaagggagcaggctcatttcacaggagagcggaaagcactggaccagggcagaggaggggccacgtgagaaaggtatttagactgactgggcagagcctgggggagggctgcaggtgagggagacaaggcaggtgttgggactccagggtttctcgtttgaaagccaggaaggatatggagtgttgggacattattacccacccccaggctgatgcatactccctgggccatgctgtatcttcctcatagcagttacacaatgtaccagacactttactcatttacttgtctgtctcctccaatgatgacaaagctccaagagtccaaaaatttttgatggttcactgagtaatccccatgtttttttagagacagggtctcactctatcacccaggctggagtgcagtggcatgatcatagctcactgcagccttgaactcctgggcccaggcaatcctcccacctcagcctcccgagttcttggtagtataggcatgtgtcatcacgcccagctaattttaaaaatttcttggccaggcacagtggctcacacctgtaatcccagcactttggaagcccgaggcgggcagatcacgaggtcagatcaaaaccatcctggctaacatggtgaaaccccatctctactaaaaatacaaaaaaaaaaaacaaaattagccgggtgtggtggcaggcacctgtagtcccaactactcaggaggctgcgg[132 bp omitted]agaggtgaggtcttgctatgttgcccaggctagtcttgaacggtgggcctcaagtgatcctcccacctctgcttcctgagtacctgggattacaggtgcaagtcgccacatctggctaaatgcatttttgatttatgatgttttaaacttatgacaggtttgtatctgtatatcgagatggtaacaagcaacatcctccct[164 bp omitted]tactaaaaaaaaaaaaaaattggccgggtgcagtggctcacgcctgtaatcctagcactttgggaggccaagatgggcagatcacgaggtcagaagatggagaccatcctggctaacagtgaaaacccgtctctactaaaaaaaataataataatacaaaaaattagccaggtgtggtggcgccagcagcgcttgtggtcccagctacttgggaggctgagaagtgggatgatcgcttgagcccaggaggtcgaggcagcagtgagccatgactgcatcactgcactccagccagcctgggcgaccgagcaggatgcgcgtgcgcgcacacacacacacacacacacacacacagtcccgggccagtcacggtagttcacgcctgtaatcctagcactttgggaggcccaggcgggagaatcacttgagcctaggggttcaagaccagcctaggcaacatggcaaaaccccattatctcttttttttttttcctgagacaagtctcgctctgtcgcctaggctggagtgcaatggcacaatcttggctcactgcaacctccgcctcccaggttcaagccattctcctgtctcagcctcccgagtagctgggattacaggtacccgccatcatgctcggctaatttttgtagacacggggtttcaccatggccaggctggtcttgaactcctgacctcaggtgatccgacggcctcggcctcccaaagtgctgggagctacagcgcccagccggcatatttcattttattatttgactcccctagtgaaatgtaagcttcacaaggaagggattctgtcttagaacggtgcctggaatacaacagacgctcaataagtgggtgtcgaataaataaatgtcccacgctgaggcttaggtacgttatgatactcattttacaaaagagaaaactaggacacacaaagattaagtcattgggtcgcacacctagtaagtgggggaggcgagtcctcagcacacgcccaataacagcattattatgattactagccgcttactcaggccttgagctaagtgctttaccctgaatcatcgcgctcaatttagcaataaccccgagccggcaccgtcgcgaacgccactttccaaaggaggaagccagggccagacgttgccctgcaaggccggggctgggccgggttcgaacccggacgcctgacgcgccctccgctctcccagaggcgttaccttggtggcccccgcttcctccccacggagcccggcgctcacccccgggccggggtcggggtcgtgagcccacagctcagccaccatctccgtgtgaagaaactcaaacaacacagtatccgccatgccccctcctcgcacgcctaaagatgcgcccagcgcttccagctctcattggccaggcttggtaagccacgcctcttgcgtcatggcgcgagccctcctactccggcttccattggtgttttagactagccccgcctccccgccccggactcaggtggtgtgcgcgtgagcctgggacactagggggcgggcctacgccttctctggccacatgtggcaacatcttctgctcttactgccgtcccttccctatttccgggttctcgagcattcctattggccaaattactggttacacgtgacatactcggcttttaaaatccctattggtccactccagactttcctcgtcgcacaacctggaagagccggcccagctgtttctctattggcggttcctccattcatgtgactcttctgcacgctcactcaaagctgatgctgagaacttgcttcctgattggtagccgggcgaatccacgtgacttggccgctaatgcccgcccaacccgctcccctattggttgaaatcacagcccttcagctgccacggtgagaacgcagcactcgggttaggaagcggatctcgcaagctccgagcgtcagctgccgggtacggtctttggcgttagcgcttctcccatcccatgagtgcccccagcagagtccagtcggactgtcatcctttctgcgactctggcgctggtcccgagcagctcacgggcccgtgtgcttccgggtctgagattggcatggtggaccaggtggagggtgtggcctctactaggaggcaaattcgtaaagacctcggcttgggactccgggaactcgggccccagatccttgttcgagctggtcttcagtttccccatctgtacgctgaagagcctggggtccagtaacccccatcatcacccagtttacagaagaggaaactgaggcccagacggggagcagctgacaccaagtcgttaagagaatcagcgaaggggctgggaatccaggacctgcgccttttacccaccgcggcgccggtctcacgtgcagtcccttcgctcttctcccctagttcggtgccatggcgtcccagggtcgtcggcggaggcccctgcggaggccggagacggtggtgccgggggaggcgaccgagacggattccgagcgctctgcgtcctcgtcggaggaggaggagctgtacctgggtccttcgggcccgacgcgcggccgccccacggggctgcgggtggctggggaagccgcggagaccgactcggagccggagccggagccggaaccgacggccgcgccgagggacctgcctccactcgtggtgcagcgggaatcggcggaggaggcctggggcacggaggaggccccggcgcccgcccccgcgcgctcgctcctgcaacttcggctggcggagagccaggcgcggctggaccacgacgtggcggccgccgtgagcggtgtctaccgccgtgcaggccgcgacgtggccgccctggctagtaggctggcggcagcccaggcggcggggctggcggcggcccacagcgtgcgcctggcgcgcggggacctttgtgcgctggccgagcgtctggacatcgtggctggctgccgcctgctgccggacatccgcggcgtgccagggaccgagcctgagaaagacccggggccgcgggcctagccatgattctacttcccaacctgactgcaatttgggggtaggccttgctgcctctgggacctgactctgtctcctgtgtctcttatcaccccccacccccgctcccatcttggtgtcacccatgggggctaatccggtccccttggataatgctttatattggatatagttcaacccctactgcggagaccagggccccactatccttagatctggttcctctcccgatcctgaccctgccgcctggttctgagccttcccctggggcttggctccagcctttgttacatagttgctccttaatctgtttccaccctgggggctcaccaattttttttttttttttttttttttggagacagggtgtttatctgtcacccaggctagagtgcagtggcgggattactgctcactgcaacctcgacctcctgggctcaagtgatcctcccagctcagccttcaagagtagctgggactgcagacctgcaccaccacgtccagctgcccggttaatttttttctgtcggtttgaagaggggagaaggtctcactatgttgcccaggcttgtctcaaactcccgggctcaagcaatcctcccactgtggcgtcccaaagtgctggggttacaggtgtgagccaccacacactgggctctgctctgcctttctgagtttggtttctgcttatggtggggagcttgttcccgttcttcccacaagaacccaggatgtggcacagcttccctgccgtcttccttcactcagttggctacgcctcccatcctagctccacttccagaactgccttcaccctaggctgggtccttgttttgtttttagagacagggtctcactgtgtctcccaggctggagtacagtggcgtgatctcggctcactgccacctccacctcccgagttcaagcgattctcctgcctcagcctcccgagtagctaggattacaggcatgcaccaccacgcctggctactttttatatttttagtagagatgaggtttcaccttgttggccaggctggtctcgaactcctggcctcaggtgatccacccgcctcacctcctaaaatgctgggattacaggcgtgggccactgcgcctagccagctgggtccttgttctgctgcccaagcttggccctggttccgtgtgctggttctactttttgttctcccatctgcctcctgcctcctcccctttgagcttagccccgccctctcagcctgatttctgtttcccaagtccagcagtgtcgtgggataggttttgctttcttttactgtctccatcctacttacacctccctgatcctggggtctggggactccccatggtttccttccttctgcaggcccaaaatgatggcccctcttaacccaaggcaggggatcttcctcccaactccctggaccaaggtggcatttcctgcacacccctccaggccaagatgatgctcgctctcaactctgtaggccaaggtggcgtctcctcttgactctccagacctaaagtgacacccttcaggcacttcgggcccaattcagcccagtcctggtgctttcagcgccagatgacagcactttgcagataagaacgatatgatgtgtggatttcactacatttggctcctggatgctataaaaggacttggatttctgacttggctcagggactggggttagcagtctctttctgctccttttcacctgtgttttcttccgatcccagctctggtccctcagccgcattcatatttactctcctctcccagcctgatatccctgtccctcatctcaacccgaagccaagatctgagcccccaagatggagaatggggaggagctttttatggcggactgattaaaactcttaagcatttacccttatggttagttccttttgtttccctatctaagctaagggtgagttggttgatttctctgagaatgggggtcccgagacctccatgcctggcttatggaaggtgaagctgtagttgggaaatcaggggccctagatttttgccctggttctgtatttactcgtattttattaattcaacacacacgttttgggtacctgacctgtgctgcggctaggggtatagcacccagtccctgccctcacagaggtcgcagtccagtgggagaaacagtaataagatgttctcatagatagttctagtaatcataatttatagtttaatttttaaaaatagagatgatagcctggccaacatggtgaaaccctgtagttattaaaaatacaaaaattttgggcgatgtatcacgcctgtaatcctagcactttgggaggccgaggcacgtgctagtaattccagctactcagggagctggggcatgagaatcgcttgaaccctggaggcagaggttgaagtgacccaagatcgtgccactgcactccagcccgagcgacagagcaggactctgtctcaaaaataaataggccaggcgcagttacgcatgtctttaatcccagcactttgggagatcgaggtaggcagatcacctgaggtcaggagttctagaccagcctggccaacatggtgaaactctatctccactaaaaatacattagccaggcgtggtggcacatgcctgtaatcccagctactcgggaggctgaggcaggagaatcgcttgagcccaggaggtggaggttacagtgagctgagatcatgccactgcactccatcctgggtgagagtgagactccatctcaaaaataaataaaaaataattaattttaaaaaataaaatagagacgagctctcacaatgttgcccaagttggtcttgaacttctgagctcaagggattctcctgtcttgacctcccaaagggctaggattacaggcatgagccactgcacccagccataatttataatttagatacaattttcttggcaccatgattagagccatgaagaagtaaaggagctttatgaaggtggagcgggatccacctgacctaatctgggcgggagagaggaagtgatgagtggtgctggagctgagcccggaaggtggaagtaggtgaaatgggagtagggtgaagagttgcagacagggagaacagcatatgcgagggccctgaggcagaagggaaagggaccataacctgtttaacagaagaagatgatttctgctctccacctagaatggagaagtgtggggtggttgtggggcaggggggtgctgagtgcagtaccagaaggggccagataaaggtgagctttaaaaaaattgtattattggctgtgcgcagtggctcacgcctgtaattccagcactttgggaggtcgaggcaggcagatcacctgaagtcaggagttcgagaccagcctggccaacgtggtgaaaccctgtctctactgaaaatataaaaattaggcatggtggcacatgcctgtaatcccagctactcaggaggctgaggcaggagaatcgcttgaacccgggaggcagcagttgcagtgagccaagattgcgccactgcactccagcccaggggacagagcaagactctgtctcaaaaaaaaaaaaaagtaggtgcggatcaaccagcatctcctccctcctgagcactccctccagctccccttccacacctagggcgagtggatcacaattcaaagaggatgatctcccagaacttcccttttctttttcttttcttttctttttttttttttttttttttgatatggagtctcactctgtcgttcaggctggagtgcagtggcgagatctcagctcactgcaacctccacctcccaggtttaagcaattctcctgcttcagcctcctgagtagctgggattataggcacgtgccaccatgcccagctagtttttctatttttttttctttttagtagagatgaggtttcaccatattggccaggctggtctcaaactcctgaccttgtgatctgcctgcctctgcctcccaaagtgctgggattacaggcatgagccaccacacctggtcaggacttcccttttcaatgagtttagcgagagtccctgaggagctgagctgcctgggagagtggcagcttagtggtctcatggtggacttccagccctggagcacagagcttccctcactccttaaactccagctcactagccaggcctggctttcagcccctttctttctttttccctccctccttccttccttcctttctttcggtggggtctcactattttgcacaggctggtcttgaactcctggcctcaatggatcttcccaccttggcatggcagggatgggaatctgattggagagggtacaagagggtgtggaaggagagccagagaccatcctctttgcaatgttgagtgaaggggtgggatggtaagaaatggggaagtggcagtgcatggtggcttacacctgtaatcccagcaatttgggaagccaaggtgaaagcactgattgagcccaggagtttgagaccagcctgggcaatatagcgagaccccatctctacaaaaaatacaaaaactagctgagcgtggtggtgtgcgcctgtggtcccagctactcgtgaggctgagatggaagaatcacttgagcccaggaggtcgaggctgcagtgagccatgattgtgccattgcactcgagc[142 bp omitted]aaaccccatctgtactaaaaatacaaaaaattagctgggcacggtggcgggcacttgtggtccaagctactcgggaggctgaggcaggagaatggcgtgaacccgggaggtggagcgtgcggtgagccaagatagcgccactgcagtctggcctgggtgaaagagcgagactctgtctcaaacaaaaaaaaaaaaaaaaaaaaaaaaaaaaggaaggaagggagggagggaaggagggaccgactggggaagtacctagatggggaagatgggaggggtcatggcatgtttgtatgctgctgggagtatttcagaagagggagaagtcgtgatacaggggaaaggtgggagaaaagccagaccattgtcctgcagtaggtaagaagggaggaggagatagcccccaaggggaagggcaacactggggtaagagagactatttgtggctagttgcaagtcactgggtagtgatgaccactctggtcatcactgcctgggaactggtctgtcacccccactggactgttggccccatgaggacggggctgaggctgtcttggccagggccagctaacccagggaaaccacagagtagatactgggcaaattgtttgttgaatgaatgaatggccttcacaccatcacacggcatcagcctctcagatgcatggagctgttgagacgttcgggcacagcctccctccaaaggtgatgggcactcggtcccacataacacatcaccctcagatgtgcaggatgagagggtcagacatgcaccaaaatgctaataacacccactccacaaatatttgctaaccacatttcaaggggaaaggcattcaaggcagaaagaatagcatgtgcaaagaaccagaggcaggaaaatcctgggggtgcttgtttgggcgagatgaattgtctgttgtgcatggactgctatagaggggcctttggcaggagggagagctgaagactcagtcaagagccaggccacacagggccagaatgaggagcagggctttgtcccaagggccctggggagccaaggcaagttccaagcaggagagaggcagggacgagtttgtgctttagcaagagatacctagatgggtcaggtgcggtggctcatgcctgtaatcccaggcctttggaggccaaggcagatggatcacctgaggtcagaagttcgaaaccagcctggccaacatggtgaaacccccgtctctactgacaatacaaaaatcattctgggcgtggtggtgtgcacctgtaattccagctactcaggaggctgaggcgggagaatcacttaaacctgggaggcgaacattgcagtgagccaagattgcgccactgcactccagcctgggcaacacagcaagactctgtctcaaaataaaaaaaaagaaacctctggctactgagtggagggtgcatgggagggggtgagactgggtctgtcctggtcactctgtgtccccagcaccactagcaaagagcaggtgcacagtaaacacattttgaatgaagatatgaatgaaggaagtggcaaacacttgaattattggacttctgttgtcactgagaataaaagccaaatcgtatattattattattattattttagagatgggatctcactacgttgctcaggctggtcttgaactcctgggctcaagcaatcctcctacctcggcctcctaaagtgagccaccatgcccagcctgtaatcccagtactttgggaggctgaggcaggcagatcacctgaggtcagtagttcgaaaccagcctggccaacacggtgaaaccgtgtctctactaaaaatacaaaaattagtccagtgtggtggcacgcacctgtaatcccagctactcaggaggctgaggcagaatgatcacttgaacctgggacgtggaggttgcagtgagcagagatcatgcaactgcactccggcctgggcgatagagtgagactccgtctcaacaacaacaacaaaaaaaaagtgctagggttacaggcatgagccaccacacccagcctcaacaccacagtctttactgggacattggaggccctatgatctggtcctgggtccatctcgctgagctcatagacaactggccacttcactgagtaatactggactctgggctgtcctctaagctgccagacagagcctttgcaattttgtttttctctggcactcagctctgtatgggcagtgcctatagcaacattgtataacaggcagtcagcaggcagtcactatttgttgacttaatgaatgaatcccctgcagctccactggagaggtctgaacatcatcctcatcagtagaaacctgagctagttggagcaggaggcaaaggagatgggtggaggccaggaggaccaggctgggagaattccaggatagggactggggcaggggtcagggtcagggtcaggggctggagctgatgtccagccaagagcagaatctagaatggaactgggacagggatgggggctggggccatgggagggacagggccaggggctagggaggggacacgattgggggcgacctcggttaagggcctgactccccaacacctctctttccagagcggcttcacagcaggaccacaggagtcattgtggccaacttcgctggaggcttggagatctttggggccattaaggcagagctgcagggcctagagattgagatgctgggtatgtccccacacctgcttggggagccccgccaagctgcaggcatcgcacactgacccagggccctttgtgatcacccttcacctggccccatctggtctccttgggactgttggggtgacacagcctgttccctctcgcccagtgaacaatgtggcatgctgtatgcgcagggacgcttgaggaagctgctcgactgtgagaatgtcgccagagtgaaacagagtcctagcccacctggcacctcttcctccaactctttactgccctctgttggaaaactcgcgtaatatacaaaggtaaagtcctcacttgggtacctgtgggggattccttccaggacccccactgatgccccagaccctaatacaaaatggcctagtatgtgcacataacctatgcataccctcccgtgcactttatttttttttaattttttaattttttgtgggtacatagtagatgtatatatttatggggtacattatgagatgttttgatacaggcatgcaatatgtaacaattacaacatagaaaatggggtatccactccctcaagcatttactctatgttacaatccaattacacatttttttttgagagagagcctcactctgtcgcccaggctggagtgcagcagcgtgatctcagctcactgcaacctctgcctcctgggttcaagcaattctcctgcctcggcctcccgagtagctgggattacaagtgtatgccactatgtccgactaatttttgtatttttagtagagtcaaggtttcaccatgttggccaggctggtctcgaactcccaacctcaggtgatctgcctgcctcagcctcccagagtgctgggattataggcatgagccaccgcaactggtcaattacacccttttcgttattttttttctttttaatagagatagtctctgccatgttgaccaggcttgtacagaactcttggcctcaagcagtcccccatctcagcctcccaaagtgctgggattacaggtgtgagccacagcgcccggcttcttttagttactttaaaatgtacaactagtcacccggatgtgctgtcaaatagtagatcttattcattctttctaattattattattattattattattattattattattatttgagacagagtttcactcttgttgcccaggctggagtgcaatggtgcattcttggctcattgcaacctgtgactcccttgttcaagcaattctcctgcctcagcctcccaagtagctgggattacaggcacgcgcccccatgcctggctaattttttatatttagtagagacggggtttcaccacgttggtcagactggtctcgaactcctgacctcaggtgatccacccaccttggcctcccaaggtgctgggattacaggcatgagccaacactcccagcctattattattattactattttgaggcagagtcttgctctgttgcccaggctggggtgcagtggcgtgatctctgctcactgcaacctctgcctctgcccagctaatttttgtatttgtagtagagatggggtttcaccatgttggcctggctagtctcaaactcctgacctcaggtgatcctcccgccttgggctcccaaagtgctgggattacaggcatgagtcactgtgcccggctgttctttctaattattatttttgtacccattaaccatccatcccctcctctgccacctccccaaccccactggctaatttttatatttttaatagagataaggtttcaccatgttggccagcctcgtctcaaactcctgacctcaagtgatccacacaccttggcctcccaaagtgctgggattacaagtatgtgccactgcacccagccagagcgccattgaatgttatttgttacttctgtcttgctgcttttaggattctttctttatccttgacctttgggagtttgattattaaaggacttgaggtagtcttcttttttttttttttctttttttgagacggagtttcgctcttgttgcccaggctggagtgtaatggtgcgatctcacctcaccacaacctctacctcccaggttcaagtgattctcctgcctaagcctcccgaatagctgagattataggcatgtgccaccaagcctggcttttttttttttttttttggtattttttagtagagatggggtttctccatgttggccaggctggtctcaaactcccgatctcaggtgatccgcccgcccaaagtgttgggattacaggcgtgagccaccacgcccggcaggtagtcttctttgggttaaatctgcttggtgttctataaccttcttacatttgaataccgatatccttctgtagatttgggaagttctgtgttattattcctttagataaaccttctacctctgtctctctctacctcctctttaagtccagtaattcttagatttgtccttttgaggctattttctagattttgtaggtatgctttattcttttatcttttgtctcctctgtgtattttcaaatagcctttcttcaagttcactaattatttctttttttttctttttctaagatagagaaaggggtcttgctatgtaacctggcctcgtctcaagctcctaggctccagtgaccctcctgccttggcctcccaaagtactgggattacaggcatcagtcaccatgcccagccactaattttttcttctgcttgattaattctgctggtgagagactctgatgcattctttagtttgtcaattgaatttttcaactccagaacttctgcctgattcttttaattatttcaatctctttgtttaatttatctgatagaattctgaatttcttctgtgttatcttgaattttgttgagtttcctcaaaacagacccctccttctctctctctctctctctcccccacccatatatatagtttttgtttgtttgtttcttgttgagacaagatctggctctatcacccaggctggagtgcagtgccacagtcttggcttactgcaacctccacctcctgcgctctaaccatcctctcaccttagcctcctgagtagctgggaccacaggtgcacactaccatgcctggccaatttttgtattttttttgtagaaacggggttttgccatgttgcccaggctggtctcgaactcttgagctcaagtgatctgcccacctcagcctcccaaaatgctgggattacaggcgccagccactgcacccaaccccagaacagctaatcaattatctgtctgaaaggtcacgtatctctgtctctctatgattggtcactgatgcttttattttatttt[132 bp omitted]cctcagcctcctgagtagctgggaccacaggcacccgacaccacgcccggctaattttttgtttttttagtagagacggg[146 bp omitted]agagttttgctcttgttgcccaggctggagtgcaatggcacgatctcggctcaccacaacctccgcctccctggttgaagcgattctcatgcctcagcctcccgagtagctgggattacaggcatgcaccaccacgcccagctaattttgtatttttagtgagatagggtttctccatgttggtcaggctggtcttgaactcccaacctcaggtgatctgcccgcctcggcctcccaaagtgctggtattacaggcatgagccactgtgcccggccggctttatttagtttctgtggtgaggtcatgttttcctggatggttttgttacctgaggatgttcatacatttctgggcactgaagagttaggtatttattatagtcttcacagtctgggcttgtctgtactcatccttctttggaaggctttccaggtattgaaaagacttttgtgttgcgatctaagtctttagtcactgcagctgtatctgcatcagggggcaccccaagcccaggaatgccgtggcccttggagacttgtagagacactgccttggtggtcttggataagatctggaagaattctctggattatcaggcagagattcttgtcttcttccttttctcccaaacaaatggagtctctctgtgctgagctgcctggagctgggggaagggtgatacaagcactgctgtggccaccagtgctgggactgtgctgggtcagacgtgtagccagcccaacacggggtctcccccaaggcccgtggtcagcactgcctgggtaccacctatgtccactgaaggccctagggctctgtgaggagcagacggcaaatccagccaggcttgtgttcatcctttcagtgtggtgtgagccccccatcacaggtgcgcccagagatgccatctgggagccagggcctggagttggaaaccttagggactctacctggtactctgttctactgtggctgagctggcacacaagccacaagacaaaatcttccccactcttttttctgcaagcaggggagcctctccctgtggccaccactgccccaggaccatggcagctactgcttggctactgccggtgttcatttaaggaccaaggtctcttcagtcagcttgtgtgaaggctgccaggcctgggtctctcccttcagggcagtgggctcccctctggccaaaggtaggtccagaaatgacatccaagagccaaggcctggaatcagggacccccaagagccaacttggtgctctactccactgtggccgagctggtaactaagctgccagacaaaggcccctttactcttccctcccgcttccttgagcagtaggagcctctccccgtagtcaccacgtcagggaatatgctgggtcatatctgaagtcagtgtgtctctgagtctcactcaaggcccacacggagtactgcctgggtactgctgctgattattcaagggtcctttagtcagcaggtaatgaatcctgcctggactgggctatttccttcaaggcagcagtttcttttctggcccagatgtttctagaaatcgccttgaagctagagcctggaatggggccctcaggaccctgcttggtgcgctatcctacggtggctgagctgatatccaaggtgcaaaacaaagacctctttattcttcccgcttatctcctccagtgtgaggaagacatttcaagccaggcgtggtggctcacgcctgtaatcccagcactctgggaggctgaggcaggcagatcacctgaggtcaggagttcgagaccagcctgaccaacacggtgaaaccccgtgtctactaaacatacaaaattagccgggtgttgtggcacacgcgtgtaatcccagctactcaggaggctgaggcaggagaatacttgaacccaggaggcggaggttgctgtgagccgagatcactccattgcactccagcctgggcaacaagagcaaaactccgtctcaaaaaaaaaaaaaaaaaaaaaaaaaaaagagactatttttgctaccccgttcagtggctctttcagtgatatgaagttaaaaccaggtactgtgttcgctcacctgattttggttcttatgaagtgcttttttgtgtggatagttgttcagctggttgttcttctgaaggagatgattactggaggcttctattcagccatcttcccctgcctcctcataattgctatctctttattgattttctcatgttgtttgtatattggttgtatatcattttcctgatttccatttattctttgtctatggtttcctttagctcataaagcatatttaagacagtcgatgatgtctgtgactagtaattccaatgtctgtgcttcctcagagatggtctctgtcaaaagaacttttttttactataaataagccatacttgcccgtttctttgtatgttttgtagtatttttgttgaaaattggacttttggagtattataatatgttaattattgaaattggattcaccctttccttggagattgctgggttttgcttgtcaagggctagagccatctgtttgactttttaaaactgtttttgcaaaatgtgtattccttttgctgtgtagtcactgaagtttctattccattttttctgttttttttttgttgttgttgtttttgtttttgagatggagtcttgccctgtcgcccaggctggagtgcagtggtgtgatctcggctcactgcaagctcctcctcccaggttcatgccattctcctgcctcagcctcctgagtagccgggactacaggcacccaccacc[131 bp omitted]caccgcgcctggcctttttttttttttttttttttttttaatgagatggagtctcactttgtcgcccaggctagagtgcagtggcacgatctcagctcactgcaacctctgcctcccaggttcaagcaattctcctgcctcagcctcccaagtagctgggattttaggcctgtgccaccatgtctgcctaatttttgtatttttagtagagatggggtttcaccatattggtcaggctggtctcgaactcctaacctcaggtgatccacctgcctcagcctcccaaagtgctgggattacaggcatgagccaccgcgcccagccaatttctcaggtatttatttatagcagtataaaaacagactaatacacccgcgatcgttccatttatttccctcttgtttattatgagcacatatgtgttccaaaagacagtgtgcttagataaattgtttgtaccttcaaactagacacaatctaaatgtcaatccattggtgactgggtaagtaaagcatgctacattcatacaacagacattatagcaatgaacacgaatgaccttctgctgtacacaacatgaatgtatctcacaagcataatgttccaccaacaaagccagagcacataccgtatgattccacttatctccagtcagaaccaggcaaaaccatgctaggggtgttgaaggtcaggacagcagttaattggggaggaggcaaggggtaatgactgcatgaagggttgcatctgagccactgtcaatattgtatttcttcataggggtggaaattaaagatttgtgttcacactaaaaatttgtgaactctggtatgtgtgttatacttttttttttttttttgagatggagtttcgctcttgttgcccaggctggagtgcaatgacatgatctcagctcactgcaatctccgcctcccagttcaagcgagtctcctgccccagcctcccggtagatgggattacaggcatgcgccagcacgtagtagagatggggtttctgcatgttggtcaggctgggcttgaactcctgacctcgtgtgatccacccacctctgcctcccaaagtgctgggattacaggtgtgagccaccgcgcctggccaattttttattctttttgaggcagggtctcactctgccaccttcctaaggtgcggtggcatggtcatggctaactgtagcctagacctcctgggctcaggcagtcctcccacctcagccacccgagtagctgggactacaggttcacaccaccatgcccagttactttttgtaattttaccagagacggggttttggaatgttgcccaggctggtcttgaactcctgcactcaagtgatccgcccactttggcctcccaaagtgttgggattataggcatgagccacagggcccagccacaaatgtatatttaatttacatggaagcctactgttctcctccctccctccttccctccctccctccctccctccctctctcccttcctccctccttccttccttcctcagagtttctctcttgttggccaggctggagtgcaatggcatgacctcagtgcactgcaatctccgcctcctggcttcaagtgattctcctgcctcagcctcccgagtagctgggactataggtgtgcaccaccacgcttggctaatttttgtgtttttagtagagacaaggtttcaccatgttggccaggctggtctcgacctcccaacttcaggtgatccacccgccttggcctcccaaagtggtgggattacgggcgtgagccaccgtgcccagcctgcctttttcaagtagtcatatgtcttggagagcattctaatcagaatgaaaaacagctgagccattctgtttacttatacggtgaccaagccatctgctagtcattcccctattgatgatcattcagggtgttccctattgtttgtgactacatatggtgtggcaaagaatatctttgaatatattcatttcccacatgtatgggtatcttggaaagaaacacatttccagatgtggagttgttgggtcaaagggtgagtacattttaaattctgttaggtgctactttattttttaattttttatttttttttgagacaggatctcattctgttgcccaggcatggtggcacatgcctatgatcccagctacttgggtggctgaagctcgagaattgcttgagcccaggagatggaggttgcagtgagctgagatcgcaccagtgcagtctagcctgggtgacatagcgagactctgtctcaaatataatgcaacatggtgtccatggtccaggtgaggctgagctaggaggtctgaggtcagggtaggtctgacccctctgggtggtcctcagtgtcccacagcactgagcctgccaaggaggaggtgctaggggaatattcctgagggaatttagggagatgggagtgaatttgatgagcaggaggcaggggtctttgggtaagtgagagaatt[131 bp omitted]ctactaaaaatactaaaaatacaaaaaattagccaggcatggtggcgggtgcctgtagtcccagctacgtgggaggctgaggcaggagaatggcgtgaacctgggaggcagagcttgcagtgagccgagatggggccactgcactccagcctgggcaacagagcaagactgtctcaaaaaaaaaaaaaatcaattttaggaaagtgtctgagagagatcagtgactcagaagagtttgagtggggaagtgctcagaagccatggcttcttgcagggggtatggtcccacaggggcccacggggtttcctgggcacagggacccaagtgggacctcagcaggtgggtgggatgctgggagtggagggggctgaggggtgttctttcctttactcccttatggctgcagtgagctatgatcgtgccactgcactccagcctgggtgacacagtgagaccttatctcaaaaaaagaaaaagaagtccaggtgcggtggctcacacctgtaatcctagcactttgggagaccaaggtgggaagatttgctagagctcaggagttcaagaccagcctgggcaacatggcgaaaccctgtctctacaaagtaaacaaaaattagctgggtgtggtggcaggtgcctgtaattccagctacccaggaggctgaggcatgagaatcacttgaacccgggaggtggagtttgcagtaagctgagattgtgccactgcactccagcctgggcaatggagtgagactctgtctcaacaacaaccaccaaaaaaaaagaagaagaagaaaaagaataaaaaagaagatttagaggctgggtgtggtggctccccctgtgatcctagcacgttgggaggccgaggcgggtggatcacctgaggtcaggagttcaagaccagcctggccaacatggtgaaaccccgtctccactaaaatacaaaaattagccaggcatgatggtgggtgcctgtaatcccagctactcaggaggctgaaacaggagaattgcttgaacctgggagatggtggttgcagtgacccaagattgcaccactgcactccagcctgggtggctgagcgagactccgtctcaaaaaaaaaaaaaaaaaaaaaaaaagatctagaaaggagagttagggagtccatgaaaaatctctagccagccctcctgaagcactagacaggggaacaagtcagagtttgcaggaaaatctgggaagtcaggcatatccaactatcagagtcatggaaggctgttgcctctgcatctgatgttgagcccgaggtcactggtggttagcagggcagaaaattgagaagagataaacaggagtgtgggggaaacaaggtcccgaacacttgcatctgtctcaccctgcagggcagagcgagagcaaatgggaaccccctaatgcatctacatctgtcttttcccccatctaaatagagcaaccgtccaagaaaaatactgtgctaaacttctttcttccagttttcatgcaattttctcctttggccaactctaacttagaaccatatggggaaggggtttttttgtttgtttgttttgttttgttttcagagtcttgctttgttgcccaggctctggagtgcagtggtgcgagctcggctcactgcaacctccgcctcccaggttcaagcaattctcctgcctcagcctcccaagtagctgggattacaggcacccgccaccacgctcagctaacttttttgtatttttagtagagacaaggtttcgccatg[134 bp omitted]tagcctgtgaggtttccactgaagtctgctgccagacgtattggagctccattgtatgtttgtttttgtttttgtttttgagacagagtctcactcagtcacccaggctggagtacagtgacgaaatctcggctcactgcaacctgcacctcccaggttcaagcgattctcgtgcctcagcctcccgagtagctgggattacaggtgtgagccactgcgcctggcctcatgcctggctaattttttttgtatttttagtcgagacgggatttcaccatgttgcccagactggtctgtaactcctggcctcaagtgattcacccgcctcagcctccctaaatgctggggattacagacgtgaaccactgcacacggcctccattgtaagttatttgttacttttctcttgctgcttttaggaccctttctttatccctgatctttgggagtttgattattaaatgccttgaaggtagtctttgggttaaatctgcctagtgttctataaccttctcgtatttgaatattgatatctttttctaggtttggaaagttctctgttattatcccacttaataaactttctattccaatctctctactttctctttacggccaataaaactcagatttttcctttttgtggctattttctagatcttgtaggtgtgccttattctttttttttttttttttttttttttgagatggagtcttgctctgtctccaggctggagcacagtggcacgatcttggctcactgcaacctccgcctcccgggttcaagcaattcccctgcctcagcctcccgagtagctgggattacaggtgcctgccactacacctggctaattttttgtattttggtagagatggggtt[132 bp omitted]cctctggctgtgtcttgtcctgtctcatctcttttctcttctcttctgttctcttctgttctcttctcttctgttctcttctcttctttcttctcttctcttctcctcctctcctctcctctcttctcttctctttttgagacagagtctcactttgtcgaccaggctggagtgcagtggtgctgcaatcttggctcactacaacctccacttcctgcgttcaatcaattctggagcctcagcctcctgagtagctgggattacaggcatgcaccaccatgcccagctaatttttctatttttagtagagacaggatttcactatgttggccaaactagtctcaaactcctgacctcaggtgatccaaccacttcagcctttcaaagtgctgggattacaggtatgagccactgtgcccggcctgactgcatattttcaaatagcctgtctttgagctcaccaattcttcaggttgatcaattctactgttcagagactgatgcattcttcagtgtgtcagttgaattttttctacttaatttttttttttttttttgagacggagtctcgctgtgtcgcccaggctggggtgcagtgacacgatctccgctcactgcaagctccacctcccgagttcatgccatcctcctgcctcagccttccgagtagctgggactacaggcgcctaccaccacgcctggctaatttttttgtatttttagtagagatggggtttcaccgtgttagccaggatggtcttgatctcatgacctcgtgatccacctgcctcggcctcccgaaatgctgggattacaggtgtgagacaccgtgcccagcccctttctgcttaatttttaaaaattatttcaatctgtttggttaatttatccgataggattctgaatcccttctctgtgttatcttgaatttcattgagcttcctcaaaacagctgttttgaattctccgtctgaaaggtcacatagctctgtcacaatggggttggtcactggagccttgtttagttcacttggtgaggtcatgttttcctggatggtgtcaatgcttgtggatgttcgtcaatggctgggcattgatgagttcagtgtttattgtagtctttgtagtctgagcttatttgaacccatccttcttgggaaggcttgccaggaaattgagtgttgtgaactaaacttttggtcactgcagctgtatctgcattagggggcaccccaggctcagtaatgctgtgattcttgcagcatcttagaggtgctggccaggcgcagtggctcacgcctgtaatcccagcacattgggcagcctaggcaggcggatcatctgaggtcgggagtttgagaccagcctggccaacatggtgaaaccctgtctctaccaaaaaatacaaaaatttgccaggcgtaggggtgggcgcctgtagtcccagctacttgggaggctgaggcgggagaatcacttgcgcatgggaggtggaggttgcactgagtggagattgcagcactgcattccagcctgggcgacagagtaagaccctgtctcaaaaaaaaaaaaaaaaggaatcttagaggtactgcctcagtggtcttggttaagattcaggagaattccctaaattaccaggcagaaactcttctcttcccttactttctccaaacaaacgcagtctctctatctctgtacggagctgcctggggctgctggaggggtgacacaagtacccttgtggccaccaccactgggactgcactgggtcagacccaaagccaacacaccactaggtctcacccagggcccgtggcaaccactacctggcttccaccaatgttcacacaaggcccaagggctcttcggccagcaggtggtgaagcctgccgggcttgtgtccttcccttcaggatggtgagttctctcctggcccagggcaggtccagaaatgccatctgggagccagggcctggagacagaaaccttaggaatctacctggtgctctattctactgtggctgagctggcacccaagccacaagaaaaagtctttcctacttgatatggtttggctgtgtcccacccaaatctcatcttgatttgtagctcccataattcccctatgttatagggggtacccagtgggagataagtgagtcatgggggcagtttcccccatactgttcttgtggtattgaataagtctcatgagatctgatggctttataaggggaaacccctttggcttggttctcat[181 bp omitted]ctgtaatcccagctactctggaggctgaggcaggagaatggcgtgaacccgggaggcagagcttgcagttagcccagactgtgccactgcactccagcctgggtgacagagtgagactccatctaaaaaaaaaaaaaaaaaaaaaaaaaaagacgtgcctttcagcttctgccatgattgtgaggcctccccagccacgtggaactgggagttcattaagcctctttttctttattaattacccagtctcaggtatgtctttatcagcagcatgaaaacagactaatacaccactcttccctcacttttcctcacacaggagtctctctctgtggccaccactgctccaggcccatggcaggtactgcctggctactgctgatgttcactcaaggcccaggccctcttcagtcagcttgtggtgagtgctgccaggcctgggtcttttccttcagggaagacagctcccctctagcccagggcaggtccagaaatgctgtgcaagagccaagacctcaattggggatgccagcagctgctgggtgctctaccctactgtggccaagctggtgtccaagatgcaagacaaagtctcctttactctttcctctcctttcctcaagcaggagtctttccccagggccaccacagctgggaatgcgctgggtcacacctgaaatcagcacggcactgggtctcacccaaggcctgcggcgagcactctctggcaaccactgatgtttattcaaggcccaagagatctttagtcagcaagtaatgaatcctgccaggactgggtccttcctttcaaggcagcggcttcccttctggtccagggtgtgtccaaaaatgtcatccaggagttagggcctggaatgggggcctcaggactccgcctggtgccctatcctcctatggctgagctggtatccaagttgcaaaacaaagacctcttgacttttcgtctcctcttctcaagcagaaggaaggagtctctcccggaactgcaagctatactgcctggggtttggggctcgggggctcaagcactcccttggctgcctcagccaatgtctcagtgggcctcatgccctccaggtccacttgttctgagcccagcaaggcaccaggacttgcccagaaattgcagtccttgtggcctgactgcctttcaagtttatttatttatttatttatttatttatttgagatggagtcttgctgttgtccgggctggagtgcaatgacgtgctctcggctcactgcaatctctgcctcttgggttcaagcgattctcctgcctc[134 bp omitted]gcttcccaaagtgctgggattacaggcatgagccaccgcgcccagcctcaagttgatttagggtcccagagcactttggcccgcagtggctaggcatgccagaactcaggttctcaccactagaatagatgatttccctctgtctaatgatcatttaaatgctccctccatgggtggtgtctgatttctgccccatggtgctttccactgtaatagaacagcgctgagttccaatgcaaagcctcaaatcagtcactgagctctccctaccccaaatgcacagattctctctccttgccatctgactgctgccaggagatgtgggaggggtggcattttggggtagcacctcaccccaaaagcccattggcttaaaatagcagtcccatcccaaaatctcaaaccaccccaaaagctcattggcttaaaatagcagtcaaatatgacatctcatggttcagtaggttaagtgggtttaaccagtcgattcttttttttttgagatggagtctcactatgtcgcccaggttggagtgcagtggcgcaatcttggctcactgcaatctctgcctccccggttcaagcaattctcctgcctcagcctcccgagtagctgggattacaggtgctggctaccacacccggctgatttttgttttgcctttttttttttttttttctgagatggagttttgctcttgttgtccaggctggactgcaatggtgtgatctcggtttactgcaaacctccgcctcctgggttcaagcgattctcctgcctcagcctcccgagtagctgggatgacaggcacccaccaccatgccccagctaatttttttgtattttcagtagagacagggtttcaccaagttggctaggctggtcttgaacccctgacctcaggtgatccatgtgcctcagcctcccaaaatgctgggattacaggtgtgagctactgcaccctgccaaatgagccaatgattgggtggagtttctcaactagttgcattcagatggcagctggggctggagtcatccaaaggctcagctgggctggaaatccaagatggcgtcttacatgtctgacatctcagttgggatggctagatcagctgcggctgaccagttatctatctctctctccatgctgcctcttgccatgcccagcttcagcttctgcatagcatggcagtctcaggatattcagaattttttttttttccccagatggaatctcactctgccaccaaggctagagtgcagtggcatgatcttggctcactgcaacctccacctccagggttcaagtgattctcgtgcctcagcctcctgagtagctgggattacaggcatgcaccaccatgcctggttaatttttttgtatttttagtagagacagggtttctccatgtttgctaggctggtctcaaactcctgacctcgcgtaatccccccaccttggcctcccaaagtgctaggattacatgtgtgagctgccatgcctggctgaaaataatagatttatacctaaccatactaataattgcattgactctaaattatgtaaacatccaattataagacagagatttcagactaaatgaaaaagcatgacccaactctatgctgcccacaagaaattgtgtgtgtgtgtgtgtgagacggagtcttgcactgtcgcccagactggagtacagtggcatgatctcagctcactgcaacctccacttcccgggttcaagcaattctcctgcctcagcctcccaagtagctgggattacaggtgcccaccaccacacccggctaattttttgtatttttagtagagatgaggtttcactatgttggccaggctggtctcaaacacctgaccttgtgatctacccgcttcagcctcccaaagtgcagggattacaggcgtgagccctgcacctggccaaaatacactttaaatagaaagacgttctgtacaaaagttaactcaaaatggaccacatcactaaatgcaaaacttaacatttctagaaggaaacataggagaaaatctttgtgaccctagatgatgcaaaagttcattatgtacaagcatgatcataagagaaaatcttgataaattagattccatcaaaattaaaaacttctgctcttcaacaaacattattaggagaatgaaaagataagccaaacagtgggagaaaatatttgcaaattacatacttgataaacaactagtatccagatattttaagaacccttaaaagtcaatagctagaaaacaaacaacccaattatttaaaaagggcaaatgatttgaataaacacttcactaacgaagatatgcagatgacaaacaagtacacaaaaagctgctcaacatcctcagtcgttagagaaacgcaaatgaaaaccacaaggtcactctccacctattagagtggttatcgtggagaaaagaggcagagtgattgcttgaggccaggagtttgagaccaacttgggcaacatactgagataccgtct[134 bp omitted]tctagtaaaaaaatatatataccaaaaattagctgggcatggtggcgtatgcctgtaattccagctatttgggaggctgaggcaggagaattgcttgaaccccggaggtggaggttgcagtgagttgaaatcccgtcattgcactctagcctggatgacaagagtgaaactctcaaaaaaaaaaaaaaaaaaaaaatctattattttcatggtttttcctgattcatctggtcattgttctctttttccaccttcttttggattaatcaagtttttttttttttttttttttttgagcaaggatctcactcttttgcccaggctggagtgcagtggtgtgatcatggctcacttctgcctcgaactcctggacaaaagtgatcctcctaccacagcctctccagtagctgagactataggcgtgtgcccccacacctagttaaatttttttttttttttttaatagagatggtgtctcatgtgctgcccaggctggacttgaactcctgggctcaagtgattcctcccgccttggcctcccaaagggctaggattataggcatgagccactatgactggctggattaatcaagtaatttttttatgattccattttatctcttttgtaggcttattagctatagctctttgttttattattttatttatttatttatttgagagtttcactcttgtcacccaagctggagagcagtggcacgacctaggctcactacaacctctgccgcctgggttcaactgattcccctgcctcactcagcctccagagtagctgggattataggcgcctgccaccatgcccagctaatttgttttaatagagatagggtttcaccatgttggccaggctggtcttgaactcctgacctcaagtgatccaccctcctcagccttccaaagtgctgggatgacaggtgtaagccaccgcgcccagctattttattttttttgagacagagtctcactctgttgcccaggctggaatgcagtggcacgatatcggcttagtgcaatctctgcctcccgggttcaagtgattttcctgcctcagcctcctgagtagctgggactacaggtgcccgacaccaagcccgactaatttttgtatttttagtaga[156 bp omitted]atctttaact[146 bp omitted]ggaggctgagtcacgagaattgcttgaacccaggaggtggaggttgcagagagctgagatcacaccactgcaccccagcctgggagacagagcgagactccatctcaaaaaattaaaaaaaatttttgcctagtgctacacataggaatgtgcaggtgcacacgcatacacctgcatacacacacatgtgcacaggtacacataggagtgagtaaaaccagtgaaattggaagattaaggtcttagaattgaactaatgtcaatgtcctgttttgatgttgtattacagttatataagatgttagcatcaggtaagtggatgaagggcaaacaagaccaccatgtactttttttttttttttgagatggagtcttgctgtgtcacccaggctggagtgcagtggcgaaatcttggctcatcgcaacctctacctcctgggttcaagcgattcttctgcctcagccttccaagtagctgggattataggcacctgccaccacgcccagctaagttttgtatttttagtagagacgggttttgccatgttggccaagctggtctcgaactcctgatctcgtgatctgccctccttgacctcccaaagtgctgggattacaggcatgagccaccacacccagcctctctttttgtaacttcttatgaatctataatctcttagaaataaaaataatcagtcaggtgccatcgctcatacctgtaatctcagtactttgggaggccgaggtgggtggatcatttgaagtcaagactttgagaccagcctagccaacatggcaaaa[131 bp omitted]tgaccaacagggtgaaacaccatctctactaaaaatacaaaaattagctgggtgtggtggtgggtgcctgtaatcccagctacttgggaggctgaggcaggagaatcacttgaatccaggaggctgaggttgcagtgagctgaggctgtgccattgcactccagcctgggcaacaagagtgaaactatctcagaaagaaaaaaaaaaaagcccacaagtatttggaaagtaaataacccagaagtcgaagaagaaatcaaaagagaaagtataaactacataaaactcaatgaaaaaaaataacatatcaaaatacatgacatgagataaagtaatgcttagaaagacattgatagatttttaaatgcttaattagaaaagaggaaaaggaggactggggagacggtggtcaaaggatacaaatttcagttaggaggagtaagttcaggagatctattgcacaacatggtgactacagttttgttttttttttgttgtttgtttgagatggagtctctctctgttgcccaggctggagtgcaatggtgctacctcggctcactgcaacctctgcctcccgggttcaaaccattctcctgcctcagcctcctgagtaactgggattacaggcgagcaccaccatgcccggctaatttttatatttttagtagagatggggtttcaccatgttggccaggctggtcttaaactcctgacctcaagtgatccgcccaccttggcctcccacagtgctgggattacacgcataagccactgcgcctgaccaactacagttaataacaatgtattgtatacttgaaaatttcgaagagagtagttctatttctttattttattgttattattgtttttttctgagacagtgtcttgctctgtcgcccaggttggagtgcagtaatgcaatctcggctcactgcaagctccgcctcccggtttcactccattctcctgcctcagcctcccgagtagctgggactacaggcgcctgccactacgcccagctaattttttgtatttttagtagagacgag[146 bp omitted]caggctggagtgcagtggcaccatcttggctcaccatctttgctcaccgcaacctctgcctcccgggttcaagcgattctcctgactcagccttccaagtagctgtgattataggcatgcgccaccacgcccggctaatttttgtatttttagtaaagatggggtttcactgtgtt[134 bp omitted]ttatgcacatgaaaaacatcagtcacaaaagactacgttatgtatttccaaatgtgaaaagtccaaaataggtagattaatagagacagagagattagtgtctgcttagggctagaaagttactagggagattggatattaactacaaatgagtatgaggtttctttatttaaaatttttttattgtgctgaaatatacataaaatttactattttaacttttttttttttttttttttttttttttgagatggagtcttgctctgtctcttaggctggagtgcaggggcacgatctcggctcacttcaacctctgcctcctgggctcaagtgattctcttgcctgagcctcctggagtagctgggattatagatgcgccaccacgcctggctaagttttgaatttttagtagagatgtggtttctccacgttggccaggctggtctcgaactcctgacctcacatgatccgcccacctcggcctcccaaagcgctgggattacaggtgtgagccacctcacccggccacttttttttttttcttttttaatgagacaaggtctcacctatcatctaggctacaacgcagaggcacaatcacagccaactgcaaccttgaacacctggcttcaggcgatcctcccacctctgtgtcccaaactgctgtgtgagccactgtgcccagccaaaagctgtttttcaatggaggaccaacatctgaaaagtacattg[135 bp omitted]tgtctttacaaaacaaataaaatattagctgggtgtgctggcacgagcctgtagtcccagctactcagaaggctgaggtgggaggatcacttgggctaggaggtagaggctgcagtgagctatgatcgtgtcattgcactccagcctgggcaacagagcaaagaccctgtctctaaaaaataaataataaatgtctatggactgcacaatattgttgattcctcaactcctctcttgctcttttgcatattggcaacataaaaagtgtcattttcgggctgggcacagtggctcatgcctgtcatcccagcactttgggaggctgaggcgggtagatcacttgaggtcaggagttggagaccagcctggccaacatggtgaagccccgtctctactaaaaatacaaaaattagctgggtatggtggtggtggagggggggcacctgtaatcccagctactcaggagcctgaggcaggagaataaattgcttgaacctgggaggtggaggttgcagtgagctgagatcgcgccattgcactctagcctgggcgacagaatgagactctgactgaaaaaaaaaaaaaaaagaaaatgtcattttcagagggcaaagtgaggaaggtgcaccctcaggacattcttgcctcagcctggggaaagagagtttaagcaattcccccagaaaggcacaggaacctcagcccagagaggggcagcttcctgcctcgggtcaggaagcacagccttgggctccgagagtccctcgtctctacctccccaagttcaaatgtgcatgcgtgaagttccaaacccagccccagtgctaacccctggctgcctcctctttctgacttctcagggaaaaaaaaaaaaaccacatacacacaaaaaatcccacaagtcaggaaacatccatcacgggctgtccagcccaggccggaggggcaggagtcagcagggaggtgacctcaaggtctccgtggggactaggatccggcggggctgggggtgagaggctggaaattttcccaccccgagactttcctgcgtcaacccaggagggcgccctggatgccgccagccctgcccccaacctccttcctctcctgacagggcagcttcccggctaaggatggatggggagggtgtgccaagatggagccaccaggaccaggaatggacaggcactttgagattgaccagacgagggaccctggctcagagtggcgaaggcctggcctcagagccacacagccaggaggtgtacatgggttggcgtcgctcccagcacatgcagcctccctctacctccactaccctgcccaggagctggagcccagcccggccttgggtgtgtgagaagccactggcccggggccctgcttccccggtccttcctccccacaacacactcaggactcagcccttccttgtgttaaatagaaacctctttattctaagtatcgaacgttccttaatacattggattggggccagaccttgaggtgagggaaaggggcgggggagctgggatatttctgtagagacttccagaacgacactcaccactctgggctatggcaggaggggaggtgctgggaacaggcttcatggccttgggaaaatgctttgtctctttggcctctgtttccccctaccttttttttttttttttttttttgagaaagggtcttgctttgttgaccaggctggagtgcagtggcacagtcatagctcactgcagcctcgaactccagtgatcctccagcctcagcctcaccagtagctgggactacaggcacacaccaccgtgcccagctaattttttattttttgtagagatagggggcaggtctcactatgttgcccaggctggtcttgaactcctgggctcaagcaatcctccggcctcagcctcccaaagtgttgggattacaggcatgagccaccgtgcctggcgtttgtttcccttctgtacagggagtttggggttgggtgaaaagacatctaagggtctttctatcccaggggtgtgtggtcccaggcagggagtcaggaggggcgccgtacgggaggttggcttgtcagcagcatagatggggtcactaaggccggcggttgggtgaccctcagcgctgggcccgaggtcgcgctagagacggaggccggggccgaggcagacaggccaaactgggcctggccagccgggagagggggaggcggcccaggaagagagggaggctgagacagaaagatgggcggggcacagggatgtctgcaaagaaggcacggtcccgagggggtgacagggctccctcctcagagagttccaggtcccgggccacggccaggatctcctggcgggcggctgtgttgcgcaggccacggatgtcgaggagggctgccacgtgcttctgcctgtggggagaggaacagacaggtgcatgcagatccccagctctagacacacacccaacccagccgtggaccccacctgaccccctcacctatcccagaaattgcctgagttctggggcctctgtgtcccctccagagccttccctccaatcagctcccttgcccaggccctcacctcataccagctccctccagaacttcacttccaaccatctccaaatcccccttacaaccaaccccagaaccagccctgggatcttccttttcaccccaagcctcagctcgtgattaaaattcaccttctcagctgggtgccgtggctcatgcctgtaatcccagcactttggggggccaaggcaggcggatcacctgaggtcaggagttcgagaccagcctggccaacatggcgaaaccctctctctactaaaaatacattaaaaaaaaaaaaaagctgggtgtggtggcaggcgcttgtaatcctagctactcaggagtctgaggcaagagaatcccttaaacctgggaggcagaggttgcagtgagctgagatcgcgccactgcagtccagcctgggtgacacagcgagactccatttcaaaagtaaaaaaaagaaagaaaccttgtaccccactccccctaaatcctcagccctaggtacctcctaatctcaagctcaaccccctaaacccaacccagctagcaaactcttaaacttagctacagattcaagttctgactcatgatccaatattcaagttcagaaactccacatcagcaagaatactgggacttcttgggaccccatgggactccaggaatatgtgccttcccaaggacatgaccttatcccccagaatcagaactgaccaccctgaatcaattccaggacccccaccctcagtgctgaaactgaaacccgctcatgcctcactccttgtttttctggggttctgtttctctgagtatgtctgagaatgtgtctgcccaaatagcactgcaaggactggcgttgctccggcagccaccaccactgccaccaccatccagcactgtcacatggtggtgtggtgtgctgatctggtacactagtttttttgtgtgtttgtttgtttgtttgtttgttttgagacagagtcttgctctgttggccaggctggagtgcagtggcgcgatctcagctcactgcaacctccgcctcctgggctcaagcaattctcctgcctcagcctcccgagtagctgggattacaggagtgtgccatcacacctggctaatttttgtatttttagtagagacggtgtttcaccatgttggccaggctggtctcgaactcctgacctcaggtgatccacctacctcggcctcccaaagtgctgggattacaagcgtgagccaccatgcccggccgatctggtgtactagttttagagccagtctactgcctgggttcaagttccacctttgccacttgctaggcgtgatatttcaatagctttaattataccccttacttataggccaagcgcagtggctcacgcctgtaatctcagcactttgggaggcagaggcaggcggatcacctgaagtcaggagctcaagaccagtgtggtcaacttggtgaaatcccatctctactaaaaatacaaaaattagccgggcgtggtggcacatgcctatacttgggaggctgaggcacaataatctcttgaacccgggaggcagaggttgcagtgagctgagatcactgcacttcagcctgggcgacaaagtgagactctgtctcaaaaaacaaaacaaaacaaacaacaacaaaataccccttataaagttggcatgggctgggcaacggtggctcacacttccccattcgtgggaagccgaggcaggcagatcacttgagcccagaagttcgagaccagcctgggcaacatggtgaaacccatctctgcaaaaaatacaaaaaattagctgggcattgtggtgcatgcctgtggtcccagctactcagaaggctgaggtgggagggctgcttgagcccaggaggtcaaggctgcagtgaaccgtgattgtgccactgcactccagccagggaaacagagtgagaccctgtctcaaaaaaaaaagaaaaaaagttggcatgtaagatgcttatttaggtctgaaataagaactcattgagtgagaactggaattgttactatagtcatggatgatgatgatgatgatgatgatgataaatttccctaataaccctatgacgagaatactactatccccatggaacggatgaggaaactgaggctccgagaaggtcacctacaaaggaagtgacctggcaggagttgaatgccgcctgcgcctgccgctgtcccagtgcgtgtgcgcccgtgtgccctgcgtgtccctgagtcccctgcggctcccctgcgggctggcccttcctgcctccaggcagccctgcgcccccctgccctgggcttcctgtgaccgcctgtttgtttgtgagccctggtggcggtggcggcggaggcagcagcggcggcaggagaaggagggaaatcttattaataatgccctggttccagcaggaaacggccgtcagacacgctcaccggctccctccctcaggaggcaggaagcacagggacggatgccaaggccgccaggagacctcggccaggcacggcgagccctggcccaggcggggtgtctcacctgatgtctgggtagtcgcgcaccaacactcccacctccacctggatgctgggcgtgtcttccagctgcatgacttcagccaaatggggcaccacggcatccagccacgaggcctgggactcctgcaggggagggagggtgcggggtcacaccctcccaagattgaccctgccaattcctgcccctcctggcttgttataccatctctaaaatgtagcagaaaccaggggtggtggctcaagcctgtaatcccagcactttgggaggaggccgaggcgggtggatcactagaggtcaggacatcgagaccaacctggccagtatggtgaaaccccatctctactaaaaatacaaaaattagccaggcgtggtggtgcacacctgtaatcccaactactcaggaggctgaagcaggagaatcacttgaaatcgagaggcagaggttacagtgagcggagactgcaccactgcactccagcctgggtgacggagcgagactctgtctcaaaaataaagaataaaaataaaaataaaaaataaaatgtagcagaagacatactatggccacatttgagaaaaatccataatataatctcctcccagttttgcaggtaatttggaactctgggaaacatctccaaacctcttccacgtctgcaaaatcttgcctttgcggggatggagactggacaaagtgtacaaggaagctccctgcattctttcttacatctgcatgtgaatctacaattatctcaaaaattttccaaagaaaacattccaaggactccgggcttggaactccaagaagagcgactgaatgaggcccttccagcccagctgaatacaactgggtacaaataagatctggcggtttttaattccagggtttagaaatgttaggatttctgtgtttctgttgcatgtagtttctctgtacgttcatggagtcttttttttcttttttttttgagacagagtctcactctgtcctccaggctggagtgtggtggcaggatctcggctcactgcaacctccgcctcttagttcaagcgattctcctgcctcaacctcccaagtagctgggattacaggcgtgagccaccacacccggataattttggtaatgcaaggagttttaactctgagccaggcactgtccaaagcacttaacaggaattaaccaatctgatcctcaaaacaatggatagggaccattattcgccttatttaacagccgaggaaagcgcccagaggcgagttctcagagcaagaaagccaggttttaagtgcaaagggtgtcggtcaaagttactggttgctattgacccgaagttgggtgagagtttctgtcctgagctctgcccctctccccctggcttttgggacctgagattctcggaagccaagccttgtcctggtttctgaaacacccccaaccgcgtcccgacactgaccagccgccggaacagcctctgcagttgcgccgcgtcctcccggagcctgccggccacgcggctgcgggtccgcgccgagctgcagcgcaggcgcccacggagcaggggccgcacgtactcgaccagcgcccgccggtgtagctcggctaccagcgcctggaggcggaggagggaaacccgaggggtgtgagccatgccccacggactcccatcccgccagtctgaaggccacccccgccccactcgcccacatccactccgggcacccatgggcacccttcccgtgcccacgccccagtccccagcccctgagctatcctaggatgccttccctggccccctaattagcccgcggacagtctctgccggtccccaaagggtgctccatcccagcctctccccattccccaagctccactctcaggggccctgactcagtctgcaccccgccttacaccccagttccacgcacatgcctccccgcagaccccgggcaggggccacctctcccatccacagggagccgctccccaccttagaggggtttcctccagcaggagcgttcttggctctcccaacctcccaatctcccctcttcccgtccctttcccctttcctcctcccctcttttcccccacccccacctcccctcccctcaggcaggtgcacctggtaaggctcgtcctgcattctgcgcagggccagggcctgggcacccagcgtgcccacgatgccatccagggcctccgggctgctcagccacttccggcgcatcagcttgttgaagtgtggctggcagggacagagtagggggtcacgctctcctccctcccaccctccctcttcacttaggaataagttcctgcaaccctgctccgtgttgaaccagggctgtgcggtgctgggaacacaaggggaagagatagccccagccctggcatccttggactcacagtccagaaggggagagagactggtccccaggtagtgatgacccaaagctggcaaggctgggactcgggaacccaggggtttaggaagcccagaggggatgcctgactcagcatagagccatggagggcttcctggaggaggggacaccggaactgaggccctggtgatgatcttccttagccaagtgagggatgggggagggggagtggctcaatgggagaaaatagtgagtattaagaaagttcagatttcagatgggcatgtcagggagaggaccagcgaaaaggtcagtgtggttgatgaaaacaggggacttcatttaaaaattattaagggccgggcacagtggttcacacctgtaatcccagcactttggtaggccgaggcaggagggtagcttgagcccaagagtttgagaccagcctgggcaacattgcgagaccccatctctacaaaacatttaaaagttagctgggactgcgcgcagtggctcacgcctgtaatcctagcactttggaaggctgcggcgggtggatcacctaaggtcaggagttcaaccctgtctctactaaaatacaaaaattagccgggcgcggtggcgtgcaactgtagttccagctactctggatgctgacacagcagaattgcttgaacctaggaggtggaggttgcagtgagccgagatcacaccactgcactccagcctgggcgacagagtaagactccgtctcaaaaataagtaaatcaattaaaaataataaaaattagctgggtatggtgtcatgtgcctgtagtcccagctactcagaaggctgaggtgggaggatggcttgagcccaggagttcaggctgcagtgaaatatgatcatgatactgcactccagcctgggtaacagagggaggccccgtctcaaaaaaaaaaaaaaaaaaaaagagaaaaagtaagaactttaagacatatttttaaaattcattaactatgcacagcccttaagggaaggaggacggattgcttccacattccacttcctaggtctggttgagaaaacatgttccccatctggagctcttaggaaggagtatagtaaatgcctcagttaataacatcctcctttttgaaagttgccttttctctccacccttgagtagatccggtatttgacgaaacttgtgaaagtgggtggaacctgtcttgccccctcttttctagaatgcactgtatatgcgactgtgactttcaaggaaatgtgtttgccatttgctgattttggggggaagttaatttctaacttcttccactggtaaatgaaggaaagtattgcaccttgcaaatgcaccaaatgaattgagttcaccattttaaaaaccgtcttttggccaggcggatctcattggaaaattattaaggggccaggcatggtggcttacacctgtaattccagcactttgggaggctgaggtgggtggatcacttgaggtcaggagttcgagactagcctggccagcatggtgaaaccccatctctactaaaaatacaaaaaattagctaggcgtgatggtgggcgcctgtaatcccagctactcgggaggctgaggcagtagaatctcttgaacctgggaggcggaggttgcagtgagctgagatcaagccattgcactccagcctcagcaacaagagcaaaactctgtctcaaaaataaataaataaattaattaagggctgggcacagtggctcatgcctgtaatctcagcactttgggaggctgaggctcaagaattgcttgagccaagggcaacatagtaagactccctctctataatttttttttgtttgtttaattagctgggcatggtggcccacactgtggtcctagctacttaggaggctgatgtgagaggatcatgtaagcccaggtggttgaggctgcaatgagctatgatcatgccattgcactccagcctgggcgacagagcaagattctatctcaaaaaaacaaacagaaacaaaaacaaaactctttttccccctgcccaaaacaaaaaataataataactttaagacagtgacagaagagcattaaaccaagattgggcctttcgaagtgtgtgttttgggggtgagggaagctgtgcgaccctgaagctggcattggggtttattccaggcataagacagggaggggagaggtgaggctggggcagggctggattgcacatggcctcctgggcttggggagaagccccagctttctcctgagggcactaggcagccatggccagtttgagctggggagggagagggtcagatttgtgctttaccgagatgggaggagacgagactgaggtagaaatgatggaggaggctggaaaaaaggggaaagtggagatagggaggggatgaaagggggtgaggaaggggaagaggagaatccaagtggtagaattcataggatgaagtgagtgaccaccacctgtggggagggaagggaggtatctggaggacaccagagaccctggagatgggcaggccgtgggtctctccctgagacaggggcggggggagggtcgggggagaggctgcagtctgggtagacacagggcatgtgaagttcggagatatccccaagatggtatccatgggagggcgtctaattccctcttcagctcagcctcagcacctgctctctcaccctgacagcagcccagttttcttttttgtttttttgtggttttttttttttgaaagatagggtctcactatattgcccaggctggtgttgaactgctgaactcaagcaatcctcccacctcacagcctcccaaagtgctgggattacaggtgagagccaccatgtctaatgtgttgctgggttttgtttgtttgttttgagacggaatctcgctctgtcgccaggctagggtgcagtggcgcgatcttggctcactgcaacttctgcctcccagtcaagtgattctcctgcctactctcctgagtagctggggctacaggcacgtgccaccatgcccggctaatttttgcatttttagtagagatggggtttcaccgtgttggccaggatggtctcttgaccttgtgatctgcctgccttggcctcccaaagtgctgagattataggtgtgagccactgtgcccagcagggctttttttttttttttttttttgatacagggtcttgcactgtctcccaggctggagtgctacggtgtgaacacagctcactacatcctcaacttcctgggatcaagcgatcctcccacttcagcctcccaagtacctgggactacaggcacccaccaccacacccagcttattgttttttattttttgtagagaagaggcctcattatgttgcccaggctggtcttgaactcctgggctcaatcgatcctcctgcctcagccttcaaaagtgctgggattacaggtgtgagccaccacgcccggccagctctgttttctgaacctccaaaaatggagcaaggcatgagggaacccacataatgcctgggccctggtgattctcccagggtccccaccctggctgatgctcacatacacatgcacactcatgcacacggcgcacacacacacacaaacactccctcaaaagcctacagctgttcacacactcacacaggcatgcgagcacagcactgtgtcctgtctcttcatgtctctagctggttgtttttctctccttttttttttttttttgagacggagtctcactctgtcgcccaggctgaagtacagtggcatgatctcatttcattgcaacctctgcctcccacgttcaagcgattctcctgcctc[135 bp omitted]tggcttcccaaagtgctaagattacaggcatgagccaccacgcacagtctatctctagctggttctgatgtctctccctctgtccctctgtcccagtctctctcctttccttcctccctcacctatcttgttttctcagtctctccctgtttcttttgcttctgctctctctgtctgtgtctctctctccctcaaaacatacatagtggtttataaggccaggcacagtggctcatgcctgtaatcccagcctgggtgacagagcaagactctgtctcaaaaacaatttaacaaaaacaaaaaagcaaacatacatagtggtttatagactaagaccgtagattcgcaatgggctttgccacttgctggtctcatcttcctcacctgtaaaatgaatctacaacccatctcataggattgcagtgagaattaaacgagccgatactctcaagcacctggcacagtgagtcctgagaatgtgtttgctgttgctataaagtctgtatatttaagatagcaagctgggtgtggtggcttacatctgtaatcccaacactttgggaggccaagtcaggaggatcgcttgagcccaggagttcaagaccagcctgggcaacatagtgagaccctgtctctaccagaaatacaaataaataggcagggcgaggtagctcacacctataatcccagcactttgggaggc[134 bp omitted]gtgctttggagaaaaatagcagggagtcgggaggggggtttggtctaggggcttctgtttttttgttttttgagagggaagtctcgctctgtcacccaggctgcagtgcaatggtgcgatcttggctcactgcaacctcagccccctgggtacaggcaattctcctgcctcagcctccagagtagctgggagtacaggtgtgtgctgccacacctggctaatttttgtaattttagtagagacggggttttgccatattggcca[259 bp omitted]taaaacaccatctctactaaaaatacaaaaaaattagctgggcgtggtggtgcatgcctgtaatcccagctactagggaggctgaggcaggaaaatcgcttgaacctgggaggcagaggttgcagtgagctgagattgtgccattccactccagcctgggcgacacagggagactgtctcaaaacaaaacaagacttgaaacaggcatgagaggcagctatgtggctgtgagagggagagcattccaggcagagggaagggcaagtgcaaaggccctgaggcaggaatgtacttgctgggttaagagacagcaagggggctggcgtggctggagtgggattagtgggagagccaggagtggggggagggtggcgggcagggcaggagatgaggtctgagaaggagagtagtgagggaaggggctgattgtgccgggttgtgggggctacagtgggattttggcatttgctctgcgtgagctgggagttgtgggaggattctgagcagagagaaggggagtgttccactgtataacatgggttgagcttgtgttacggccaggaacacactccccctgcagtctctctcctcagtgctcccacccccctaccacattcactcacccacctttgcaccgaacccctatagggcgggcacgaggaccaggagatgggtgtatggggctctggggtctaggagagcctgagcagggatctgggggacctcagtggggaggggctccatccaaacctcaagccccctcctgctgatggccctctgttatcccggtgggtgcaccctctccactccaccaacagcccaggcatggccttaactgcccctgccccccgcccctgtctgcttcccaaacactgagccatgggctaaaaggaactggaggatggtggggggcagcgcttccctgtcctggcatgggccccaaccctggcctcccacctcactcacctgcagctcctggaacagcaggttggccacgacacggtggcagagccgggtcacatggtccagagcactagcagatgcttcccgggccggctcgctttctgggggccccacccgggccaggcgctcggccagagctctgtggggatcaacagagccaaaactgagggaccccaacatctcagcccaactgcctaggcctgtcttcccttaggtagatcagaggggcacaggggtgacaggtcagatggggggctgagaaaggtcagggactctggagaggggtcaggggatgcttgacaggttgggggtgtctggggattggggtgtctggggacgtcaggggactcatggatgttggggggctgagggatggctaggaggtctagggtatattgggggagggaaggggggtctctctgtgtcttcgggtctcagtttctcttggtgctttctgggtgagagtgtggaggcctccattctaaaagtctgtggttcttttttttttttttgagacggagtctcgctctgtcacccaggctgcagtgcagtggtgccatcttggctcactgtaagttccgcctcccaggttcatgccattctcctgcctcggccttccgagtagctgggactacaggcgcccaccaccacacccagctaattttttgtatttttagtagagatggggtttcaccgtgttagccaggatggtctcgatctcctgaccttgtgatccacctgccttggcctcccaaagtgctgggattacaggcatgagccgccgcacccggccaagtctggggttctaatggtctacagctctgaaactgtacccttactcttctctttttttttttttttttttgagacacagttttgctcttgttgcccaggctggagtgcagtggcgcgatcttggctcattgcaacctcaacctcccaggttcaagtgagtctcctgcctcagtctcccaagtagctgagactacaggcacccgccaccacacctggctaatttttgtatttttagtagagacaggttttcaccatgttggtcaggctggtcttgaactcctggcctcaagagatctgcccaccttggcctcccaaagtgtgggattataggcatgggccactgcatcctgccccggccatttattatgattactattatttgtaatacaaatggtagaatagtatacccacttctgccctttccttcaacagcttggagacttttccgttagggcatgaagagttctcacgctcctttttaacatctgaactggattccactgcttagctgtcctatcatttatttaactggccctcgatagatggacagttggttccattttttccagggaggaaccctgcacatatgtcatatcccatgagcttttggcctctgaagggtgcattcctagaggatctgctgggtcaagcgcccagtgtttgtgatttgggcagaaagtgcttggtctggactgttctccattcggcaatggaagaacacagactgctacaatgataggaaatgggaatggccaggcaaggtggctcatgcttgtaatgccagcattttgggaagctgaggcaggagcatcacttgagcctgggagtccgagaccagcctgggcaacatagagagacctccatctcttttattttcttttttttgagatggagtctcgctctgtcacccaggctgcagtgcagtgacgggatcttggctcactgcaacctccacctcccaggttcaagcgattctcctgcctcagcttcctgagtagctgggattacaggcacctgccatcatgcccagctaatttttgtatttttttagagatggggttt[133 bp omitted]ttttttgagacggagtctcgctctgacgcccaggctggagtgtagtggcgcgatctcagctcgctgcaagctccgcctcccaggttcacgccattctcctgcctcagccttcggagtagctgggactacaggtgcccaccacc[171 bp omitted]taaactaatcaaaaaggataaaaaggcaaaaaaaaaatctgtcattcttttttttttgagacggagtcttgctctgtcttccaggctggagtgcagtggtgcgatcttggctcactgcaagctccgcctcccgggttctcaccattctcctgcctcagcctcccgagtagctgggactacaggtgcccgccaccatg[175 bp omitted]ggcgtctaggattctgtaattcgaacactccaatattcggatgctctgtggtgctatggctgtttcaaggactcccagattttatgcgtctaaggtcccatgctcagactcccctgagtcagttctgcaatccccacccaggatccgggcatcccaggtcagcttccaccttggattggtcctccctccatcacaccatggatgccctcacctcagtggggggccgcagttgaccagggcgatggtcttgctgatataggtgtcaggtagcatctcccggactgctgggttctcatggaatcgctccacacgctgctggaagctggtgggaggaaaggggacagatagggcgccactgggtcagggtccctcgtgggcacccagcctgccaaagccaccatccctgcggtggcactctacctgtcctcaggtgactccctctcatctctcctctctctattggatcccaggccctgatgcccaacccccagcagagctaacctgtgctcccaggttcccctacctctgcaggaactctgccagcccgcctaggcagcagtgggccatccgctccccaaactcctggctgatgcggggtgctcgctctgtgtgctcttccagcagctgtgaggtccagggcgacaagaagaggtgaggaggggcaaggtcccactttccatccagcccatcccccagcctccctccacctcctacctcacacacatcctgggccaggctgctgggctggtcctccaggctcccccagtgctcttcgtcctcctgcagcacacggagaagggcagcccgggtctgagcctacagtagggagaggggagacaggcaggagttgggggcggcctggaggtctttttttttatctctttctcccaccacaatcccctagcccttaaccccaagcagttctggattctacctatgagcttgtcaaggtgatgctggggagggaggctgagccagaaaacttctgcagcccttcccactcctaactctgtggtttggaacttcatattaaaagtctggtttggccaagcgcgatggctcacacatgtaatctctttgggaggctgaggttggcggatcacctaaggtcaacagttcaagaccagcctggccaacatggagaaaccccgtctctactaaaaatacaaaaattagctgggcgtggtggtgcgtgtctgtaatcccagctactcaggaggcagaggcaggagaattgcttcaacctgggagacagaggttgcagtgagtggagatcatgccattgcactcccgcctg[138 bp omitted]acggtgaaaccccgtctccactaaaaatacaaaaaattagccgggcgtggtggtgggcgcctgtagtcccagctactcaggaggctgaggcaggagaatggcgtgaacccgggagacggagcttgcagtgagccgagattgtgccactgcactccagcctgggcaacagagtgagactccatctcaaaaaaataaattaaaaaataataaataaatagataaaataaaattagtccatggttttaagcttcctccatctaataagcaagggcttaattgtgtgtgtgtgcacgtgtgtgtataattaaatatatacatatatttatgtattaaatatatacatatatttatgtattaaatatatacatatatttatgtattaaatatatacatatatttatgtattaaatatatacatatatttatgtattaaatatatacatatatttatgtattaaatatatgttatatatgtaatatatttatatattaaatattagtataagctatataatgtgtatattaataattcataatacgttatttatatattaataattagtatgtattatatactatagcacatgaaatatgtaatctatattaacatataaatattaaatataaatcaataatacatattataaataatatattataaataatatagatacatgtgaccaggtgcggtggcttatgcctgtaatcccagcactttgggaggccaagatgggcagatcacctgaggttgggagttcaagaccagcctgaacaacatgtagaaaccccttttctactaaaaatacaaaattagccgggcatggtggcgcatgcctgtaatcccagctacttgggaggctgaggcaggacaatcacttgaacccgggaggaggaggttgcggtgagccgagtttgtgccactgcactccagcctaggcaacaagagtgaaactccgtctcaaaatatatatatgtgtacattataaataaagctataatataatatattattgtatattatttataatatacacatttatatgttaatatgtatacacaaataatgtatacttaatatttatattaaatataaatcctattattacatattatgatatgtatgaagtattatttatattaaatattgtttttctttagaggccacgtcttgctctgtcccccaggctggtgtgcagtggtaccatcatggctcactgcagcctcacactcctggactcaatcctcccgcctcagattcttgagtagctgagactacaggcacgtgccaccacacccagctaactttt[136 bp omitted]ctgcctcagcctccagagtagctgggactataggcacccgccaccatgcccagctaattttt[166 bp omitted]caggctggtcttgaactcctggcctcaagaaatcctcccacctcagcctcccaaagtgctgggattacaggtgtgagccaccgcgcccggccaagggtctatgttttattgtcttttggtcccaagactctgctctcaggttctgccaaacagttagtttaagattctcagattctgtgtttcaagaactccaaaggctgggctgcaaaggttctcacatctctgattctctgatcaaatgtgttgtctcggctggggtgactcatgcttatactcctagagctttggaaggctgaggctggaggatcacttgaggccaggattttgagactagcctgggcaaaatggcaagaccctgtctctgcaaattttttttttttaaattatccaggcatggtggtgtgtgcctgtaatcccagctactcaggaggctgaggtgggaagatcccttgaacccaggagttcgaggctgtagtgagctgtaatcatgccactgcactccagcctgggcaaaagagggagacatctgtaattaaaaaaataaaaaagtataatcctcaatttgatgagtttaaggatccagatctcttttctatggttctaggctcttaagtagcattgactgatttctgtggctggaagtaggactggaattgagacagcaaacatcactgtagccggggacggcgtgcatggctgggccattctgctcagcggtgtctgtgcaggttcagtaattaaccatgtttattaccagccctgcttatatgtgaagatctttgtcagccaggcctgatggcacgtgcctatggtgccagctactggagaggctgaggcaggaggatcgcttgagtccaggaggtcaatgctccagcctggcaacagagcgagaccctgcctcaaaaaaaaaaaaaaaaaaaaaatctttgatgctatacttctgtgagtctttgggcctgtgagctgtagttctgtgactaactttcttgtactctaaggtttgaagtgtccagatatactgaacctttaccaagtgtctctgtacagcggcctttgtgtctatggcacatggatagaactcagaagttcgtaaagggaaaagggagttggaaagagtgaaaggtggaggggacaggcttcccaagcccactgtgaccccctccctccacagcacctcctgcttccaaaatgcaaagttccaggtaccttaacatctgtgacgcattcatcctccaaaccccgcagggtgccaggggagagaaggggccccagctccccattctccagggcggccatgtccaccagccctaggacctctctggggatgggggtgagagaaaaggaggtctgtgaaaagtggggctgggcagttggaaccttccccacaccctcctacccactgtttctgtgaccctgggccactcccttcctctctctaagtcatctctgctcatccctcagaggaagtctttggaattgttgcttccccggctccagctctctgagtcagctccctgatggatggtgtcccggcatgatatttaggggtcaagtccaggcttgaagatctgacatgcaaggcttcacccatgatccatttcaccagacagaagttccctttgcacctatgctctgaggccctgctgccttacctggccttggaggcttccccagtccagccctctctccccaccttctacgagcttacatgcctggagctatgtgatatcatcaatatccacccccaaacaccccagacttgggctcatggcatcctctcaattataaacaccattgccctacaaattggaccaaacccagttcccaccactttaggaagctttccggactccctatcctgcctccatcccttatagataacatgagagcattattgacatacattcccaaatgagatctatgtggtcaatgtgggtatctgttgccttcccagtcttccggtgacagcatcctgattttgttggaagaaccacccacccccttcactgtccaacgtgtggcttggatgtggctaactcccttttctctggggtagacaggtgacctggaggtggctaatcaccatagtccatcccccggccacaagaatgggtatgttttaggacacaaagtctcaacagtaataagattctaggactgagagggaccatggtactgaggttctgggtgctacccttatagaattcaaggggcaaacagcactcaagtcctaaaactggcccgggcatggtggctcacacctgtaatcgaagcactttgggaggccaaggtgggtggatcacttgaggtcaggagttcgacaccagcctggccaacatggtaaaaccccgcctctactaaaaatacaaaaaaattaggccgggcacagtggctcatgcgtgtaatcccaacactttgggagttcgaggcaagtggatcacctgaggttaggagttcaagaccagcctggccaacatggtgaaaccccgtctctactaaaaatacagaaattagctgtgcatgatggtgggcgcctgtaatcccagctactcgggaggctgaggcaggagaatcacttgaacccgggaggcggaggttgcagttggcagagattgcagcactgcactccagcttgggcgacagagcaagactccgtctcaaaataaataaataaataaataaataacgtcctaaaactagaaggatcaacagtgttgaggttctaagaccaaaagagggaatgaggctaaggtttaggattcaaagcttcattggtactaagcttctatggttgcaccatacattctaagttctaagattggaaacgtcaacagtactaatgccctaggctctaaagagaaagcagtgtaggattctagaattctaagtgtcattgtattaaggtgaagggtcagtggggctatggttctaggaaggaatggtcaacagtgctaaaactctaagactggaagggtgaacagctaagattctagtagcgtaagtgtcatgaagcccaggttcttggactggtgggcccaccgtgctgagctactaggattgaaactgtcgatagtgctaaaattgtagaactggaagagtcaatggtgccaataggttctaggtctgaaagggtgggaatgctaggattctaagactggaagcatcagtgttacttagatgctaggagtgtaactgtcgatgatgctaaggttgtatgtaggtctagaagaatgaatggtgttgagattttaggaacggaaaagtagcaacgcaaaggttctaggactagaggaatcaatggtgctaagattcggggactggaagggtggacagcgaggcgatctagagtgtaagtgttgacagagcgctgaggtttttggaccacagtggtgccggagctcttattctaggactgcaagcgtccatggtactaaggtgctggaaccggaagcctcggtagcagtgagagtctaggattgtaactgtcagcggtgctgacgactggatgggttaatggtgttaaagtgctaggactgtagggtcagctgtcccaaggtccttaaggtctgaagaagccagtgctagggggtagggctgagggtttcacgtgaccttgggcaactgagtccagcttacctggggtagacctgattgtgccagtgcagcagcgcgtagcggtcggccagcggcagcctgcgacgggcggaggcccccagccactcggccagggccccgtggtagccgcgcaggtagacgccgaaggcgcccaggccggcggggtaggcgggcgccaggcggccccgcaccacggccatatcctccagcagccgcgcccgcagcgcctccagctgcccggccaggcccccgggcgccccgggagccgctgcctctaggcgctcccgggccgcgcgcgccacggcttcggcccagcgtgcgcgtagtttgcgggccgccccgggaccccgacgcccgtcggccgcctcctcctgtaccagcacctggcccagctgcgccaccgcgccagccccggcgcacgctcccggcccggggcccgccagcgtctcgcgcaccagcgcccacagctcgcgctgcagggcctcgtacagcagcgccacgtcccgcgcccggcggcccccgccagcgccctcggccttgggaggcccaggcgcgccgcccctcgacggcgccagctcctcggcctctagctccaggatgtgctcgtccgcacgcgctagttcgcgctgctggatcaggctcaggatctccagcactgcgggagcaaagcgggaggtcagcagtgcgcgggggggaggagggcgatgccggacgcggggttgggggtgcttaggaaggggagagagatgaggggaaaagggttacaggaggcgggaaagtgtgggggcagagaagagcccggagaagagcaagaaagaaggatgttgagtgaaggatgtaggggaggggtcagggtgaggggctcatgcttgtaatcctagcactttgggaggccgaggccggcggatcacttgaggtcaggagttcaagaccagcctggccaacatggcaaaacctcgtctctactaaaaatacaaaaattagccaggcgtagtggcgtacacctataatcccagctactcgagaggcaggagaatcgcttgaacccggaaggcagaggttgcagtgagccgagatcgcgccactgcaccccagcctgggcaacatgttgagcgagactctatctcaaaaataaataaataaaaaagagagagggggaaaagaaaaatgcctgtgactgaggaggggatctggggaggttgcagggcggaaaaatggaggaggggtcggaggaggcgagaaggttgagagaggagccacgtaagggggagagagatggaggcagccggtgggagtaggaggggcagggtggtgacttggagatggggagaggatatgggaccactgatggggtctttttggggtggggatggctgtgggctgatctggccctctgatgagttcagactgcctcgagaaaggcgagtcgggctggaaggcctctgaggctgaaggagggtcctggcagcccagggttaccctcgacacctccacccccctccacttcctccctggcagagaaactatttcctggccagcgctatttctgcccatccgtttccagaaggcggggctctagtcaccccctcctcacctccctccagtgccctcccagtccccagggagctggggctgaaatagcctctggccagaacgtggagggcatcagaggacagaaaaggctctcctgaggtccccagccctggagcagttcgggcctcggggctaaaagccgggctcaggcacgggagcagagataaaggcagggttgggggtggcggtgaattaagatggggattgggacacggatggggatagggccggaggtgaggatggggtgaaggtgggggttgggatgagggagtttagggttaggatgaggtcaggtgggagtctggacagaaatgggaaagaggcaagaatgacattggggtctgggtagggatgaggttggagaggtgggggaggggaatgtaggtgaaagctgaggatggaaaggacataaagattgatgtgaaggccgagtgcggtggctcatgcctgtactcctagcactttggaaggtgggcggatcacctgaggtcaggagttcaagaccagactgaccaatatggtgaaacctggtctctactaaaaatacaaaaattagccaggcatggtggtgcattcctgtagtcccagctactcaggaggctgagacaggagaattgcttgaacccaggcggcgaaggctgcaatgaactgagatcttgccattgcactccagcctggatgacagagctagactccatctcaaaaaaaaaaaaaaaaaaaaaaaagattgatgtgagtttgaagatgaattgtggaagtgagttgggcttgggaataggaacatggatggaattgaaaatggaggttggggatgggggtttaggactgggactcaggataggggtgaagatagattagggatgaagaggaggttgcgtttggagttggaattgaaactgggggctgaggaagaactaggaactcaaataggactgaataaggaggttgatggccaggtgcggtgactcatgcttgtaatcccagcactttgggaggctgaggcgggtggatcacctgagatcaggagttcaagaccagcctggccaacatggcaaaaccccatctctacaaaaaatacaaaaaaaatttagccaggcatggatggtgatgcatgcctgtaatcccagctactcaggaggttgagacaggagaatcgcttgaacccaggaagcggaggttgcagtgagctgagattgtaccattgcactctagcctgggcaacagagtgagaccctgtctcaaaggaaaaaaaaaaaaaaaggaggtcgccagagggaaatgggtggaaggtgggtgctgagaggggcctggggttgggggttaagagtgagaccaaaagagtttaaaagggtggaaggtgaacatggggaagaatgggatatgaaacggggctggaccagttgggggttgccatggtgttggacatagacaatgacattaaagatggcgtttaggccaggcgcagtggctcatgcctgtcattccagcactttgagaagctgaggcaggaggattacttgaagccaggagttcaagaccaacttgagcaacatagcgagacccccatctctacaaaaaatgtgaaaattagccaggtgtgatcatatgtgcctgtagtcccagctactctggtggctaaggtgggaggattgcttgagcccaggaggtcagggctgcagagagccatgattgcaccactgcactctagcctctagcctgagtgatagagcgagaccttgtctccaaaactagatggcatttggaggaaaggatgagctgtacgagaagcatacggatgtgtctcagatagagactgatggtgggcttggaataagtgtggggtgagaacagaaaaggcactgaggaagacactggggcttggagtaggaatggggactgaggatgaagacagggtggtgttagggattgaattacgtccccccagaaaaaaaaaagatatgtgaagtcttcaccccagtacatcagaatgtcacctgatttggaaatagggtctttacagaggcaatcaaattaaagtgagatcatagggcagacccgaatcccatgtgagtggtgtcctcataaaaaggagaaattggccacacgccgtggctcaagcctgtaatcccaacattttgggaggacgaggcaggcagatcacttgaggtcaggagtttgagaccagcctggccaacatgatgaaaccttacctctactaaagtacaaaaattatccaggtggcacatgcctgtaatatcagctactcgggaggctgaggcaggagaattgtttgaaccccagaggcagaggatgcagtgagccaagattgcaccactgcactccagcctgggcgacagaggcaaaaaaataataataataaaataaataaaataaagaaattgaagaaattggggatagaaagagaagggggagagatgggaccaaaatcaggtattcccttggctttagacatgggagtagggctgaagacggcaggtggaggaggcaaagattgagggtgggcatatattaacaggtggcactgaagagaaaggttgacgacagggattaggactgcagtggtaatgggttggagctggcatggaggtgggagatgtgagttagacatgtgaattgcaggtcggggtcacaggtggtagctgggatgggcttaagtatgaagcctgggaccaccagggctggggatggacatgggcactgggattctcccaggacagggtcagggctccggactcacctgacaatggctccttcatctttgggggctctgggaccttgggtgggggctctggagctgcctcgcctgcaggcaccactctctcagccagggacgcacgctggggcttggatccacgccccagtctcaggaaggccagtctccgggcggcctcccccgctgcctcctcgtcgccgtgggctcgggtcccatgcagccgggccaggaggccaaaatctgctgagctcctgcgtatccctggtaccagcacacggcccaagaaagagcggggctgcccatccccagggctgcctgcccgccggcccggggcccagcccagccggaagggggccaggcccgcaagcttctccagggtggcgcggcggcgacaagatgttccattggggagggaccccagctccccggcctcttcttcctccagccctgaaacttcttcaaaggggttccgagaggacctcaggggcagggtccccgcccggggcaccttagggtctgacactcccagattcttcaggataggcattttgacaggtggggacctggggaaaaaaataatgaccatgggcgatgctgatgacaatggtggtatggatgacggtgcctctgtgtaccgagcactttggggtgagcgtaccagacacttgcctgagcacttaataagcccttgatct[135 bp omitted]tgcctca[222 bp omitted]tcacccaggctggagtgcagtggcacgatctcggctcactgcaacctccgcctcccaggttcaagcaagtctcctgcctcagcctccggagtagctgggactacaggcgcgcgccaccacacaaggctaagttttatatttttagtagatatgtggtttcaccatgttggccaggctggtcttgaactcctgactcaggcgatccacctacttcagcctcccaaagtgctgggattacaagagtgagccacctctgctggcctggaatattctctatcttaagttgatcctcctactccgtggagaaacaggctgagaggggggaaggctccctcccaagatgacacagtcagtcaagggcagagatgatatggggactcaggccctaccatccacccagacgtccagggcagactcctgagcacctgcctacaccccctcatccccttcatttctcctgtttgatttgtacccttgtcatctctccctcattcatctcttcagcaaaaacttattgggaaatgtctagaataggcaaagcctaattttttttttttttttttttgagactgggactcaccctgtcacccaggctggagtgcaatggccccatcatagttcactgcagcctgaaactcctgggctcaaatgatcctcgtacctcagcctcctcagcagctgggactacaggtgtgtaccaccatgcccacttaattaattaattaatttatttatttatttattgagacagggtcttgctatgttgcccaggctggtctcaaactcctggcctcaagggatctatccacttctgcctcccaaagtgctgggattacaggtgcaaatcacctcgcaggtctctaggcaaatccttagagacagaaaggagactgacaataggactggagagaacggggaatggcgagtggctgctaatggatgcagggtttccttttggggaaaggaagacactctggaactagataaaggtgatggttgtacaacactgtgaatgcattaagtgccacttaattgtatgcttttaaaatggcttaaggccaggcgtggtcgctcatgcctgtaatcccagcactttgggaggtggaggcaggcagatcacctgaggtcaggagttcgagaccagcttggccaacatggtgaaaccccgtctctactaaaaataaaaaaagtaaaaaattagccgggcgtggtggcatgcacctgtaatcccagctactcgggaggctgaggcaggagaattgtttgaacccaggaggcagaagttgcggtgagctgagatcacaccaccgcattctggcctgggcaatagagcaagactcagtctcaaaaaataaaataaaacaaaacaacttactaggtattagccatgggcccagccctgtgcaggcgttagggacacagcagtggccagggcagcccccatccctgccattacagcttcctgagtcctgcccattccatctcctaagcctctcttcagtctgcgctccctcctttcactcacttcccatagcccctaccccaagcggaacccttgcccacttccctgccctggcctcctccctggtccccagcctctagtcttggcacc[145 bp omitted]aaaaatacaaaaaattagctgggtgcagtggcaggcgcctgtagccccagctactcgggaggc[137 bp omitted]cctgctcttctccatctcctaagccttccatggctccctagtatcttcaggacaaagctgaggcctctcaccacagccttcatgctctggcagctgcacacgtcactagtgctgtcccgtagcctcctccttaccccaggaacctccaggtttcagcatctgctggtgcttctacatagacgcctgttctccatgctccagtcaggacttcaggactcacacttcaggactcagccccatgccccctcctccaggaagccctctgtgaccctcaggctcccagtccctgggttcccacacctcacctctgcctgctctgggtcatccctgtctggggacagatctgtgtcccttactggactgcaaacctcagcaggacagggctggggctgtctcagtcaccactgtgtccccagctcccagcacagggcagacactcagggaatgggtgctaaacaggaaatgaaggaaggaaagtggcaagacagttcattccttgtgtggggaggaggagggtgagtcgagctggaagaggtcactagggagcaggccacgcagggctttaagttccttgataagggacaggctttcttccaagagccctgcagagccacagataggtgctttttaaaacaatgaaatagttcaaacattcggaaaagtacagaagacaagcttaataaacacttctgtgcctacaatcctagccacagctcacacaatcatttgctctcttagttcaggtttttgttgttgcttttgtctttagagacaggatctcactctgttgcccaggctggagtgcagaggcgtgatcatggctggctgcagccttgaactcctgggctcaagcgatcctcccacctcagcctcccaagcaacggggacatcctgctaattttattgtttaattttttgttatagatggggtctcgctatattgcccatgctggtctggaactcctgctcctggcctcaagcaatcctccctcctcggcctcccaaagtactagaattacaggcgtgagccaccatccactgccctgatttttgttttaaagaacaagccaggcgcagtggctcacgcctataatcccagcactttgggaggccgaggagggaggatcacctgaggtcaggagtttgagacaaacctggcaaacatggtgaaaccctgcctctactaaaaacacaaaaattagctgggtgtggtggcgggtgcctgtagtcctagctacttgggaggttgaggcaggagaatcacttgaacccaggaggcggatgctgcagtgagcccagactgtgccactgcactccagcctaggcaacagagcgaaactccatctcaaaaaaaaaaaaaaaaaaaaagaattacaaatgcgtgcagcctcctcctgccacctctcctggtcccactcgctctggccttctcctaaggaatccagcatccagaatgaatgtgctgtttacccgtccaagtagatttttatcccatgctccatagacttgtatccagaaataatatactgttctacatggtttcaaactctctataaatggtatcatactatttgtatcttgcaacttgctttaaaatttatttttttgctcacgttatgaacttgtgagaatttatccatgtctagccatacagctccagttcatttaagtgctatgtaatattccactatatgaattgtgtaaagggtcagatgttcacttgttcttctattgctggacgtgtagcttgtttgtcaccacgacagggttctgagcaggtcaggacagggtcaggattatgcagacgtgcgggggtggacaggaggcctgggaagagggtggtgtgcaaaaggcctgggttgcctaggttatgagtaagagcacccctttccatgatggggaggccccttctttctttccctgtttcaacccctgagctgctgcttctcaaccctccagttcctagaaacgctctcggacctccttccggtctccatgggcccccgcccccacaggaggcagtcaccatgacgaccccttgcctggagcccccatggctgtgtgcaatagatactcccccatgcacacacattatttgcacactcatttctcttctattttattttattttttcagatggagtctcgctctgtcacccaggctggagtgcaatggcgcgatttcagctcactgcacctccacctccagggttcaagcgatttctcctgcctcagcctcccaagtagctgggactacaggtgcccaccaccacgcctggctaatttttgtatttttagtacagatggggtttcaccatattggccaggctggtctcgaactcctgaccttgtgatccgcctgtttcagcctcccaaagtgctgggattacaggtgtgagccaccgcactctgtccttctcttttattttttagacagtctcactctgtcacccaggttggagtgcagtggcatggtctcggctcactgcaacctctgcttcccaggctcaagcaatcctcccacctcaacctcccgagtagctgggagtacaagtgcaagtcaccacacctggctaatttttgtatttttagtagagatgaggtttcgccctgttgcccaggttggtcaactcctgagttcaagcgatccacctgccccagcctcccaaagtgctgggattacagtcatgagccaccacacccagccttgatttctctttcatcctctgaactggcatccacatgcctcatcccaaaatggctccatcatcccccctccaccccataactgtctccatcttcctctcaaaatttcaggctcgaatttccctccaattgaagtcaaccttgcccggactacatctgactttcccccacctggcttcaatatcgcctccaaactggatccaacatccccaaacctggctgcaacattttcccaaaactgtctccgacgtctttccccttcctggctccaacacccgcctctgcaaactggtgctgacatcctgccccctccaaccctctgtctgcctcccagtgcccagcccctgactcacttccgaggcatccctcaagcccccagcctctcaggcccgcaggatgtcttggccaccagagcttccctctttgagcccctcctcctcttcctcactgccagccttttccccggagtccctaaccttctgcagcggccctgacctcggtttgcggaatccatcacctccaacgctcagcatctgtattagagaacggtctttccatatggcatgtccccaagcccaaccccaaccagtgcaaccccaatctagtccttgaccccaaacacaatcctgtcatcagcccagaccactgcaagctcatccacatctccaatcccaacctgatctcggtctctcctgcttgatctcaatccctacctggtccctgtctcccatctccgagaccccatctcttgggatagaacaaatacccgatccttcctggcctcagtcttcccgcccagactcgcaggacattcgacccaatgtcatctcatctctattctcctttggtggcaccaaggtttctaatgctcccttgcaccctttgtggaccccgcgagtcctcaaattctcccctgcaccctcctctcattttcatctcctttctgccttctcgccagcacccctctggagtcaggccccagattctctctttgcccccagcctctgctgggttcaaggtacaggttctcatcagctctggtccagtgcaactaagggcaactgttttcccagttgccctggggaagggggaccccttccccctgtccccagcacactcacctctgtcctcctgcccgtccttctgttcccgctgctgtcctgtccccaggctacttcagccaggactgctgggagcttggatctgagttgggggggtgctcggaggaggacaatttcctgtcaggaaacccctccctctctggggccaggggcgggaaggactcattatctgtctgcccttttaggccaggctgcggttgggctgggaaggccgaggcccacagctgggcccccaccctcacccccgctccaggccggaatccgcccactcctgcatgctcttcacgcctcccaaggtgacaacaccatcctgggcgccccggggagacaccccaagctggacgccagcccagagctgctctccagcatgggcaagccccgaggccttagaatgagaaccggggggcaggcacgcatctctctagagttccctgccacgggctgaagaccaggagggaagttttgctgggcccaggggctggggagggggacctatggaggagggcactggacatggctttggaattgtggttctctttgtctagaagcccctgtacccaggtctctgcatgaggccctccttttcatcatcccagttccagccccacagtctcttcctctgttctccactgtcccgtctcacagagtcgtcactctgctttgtcaatttatttttctttttttttttcctgagacagagtcttgctctgttgcccaggctggagtgcagtggcgtaacaatagcttactgcagcctggatctcccagactcaagagatcctcccacctcagcttcctgagtagctgggactacaggcatgcaccaccatgcccagctaatttttgtattttttgtagagacacgggtctcattaggttctccaggctggtctcaaactcctggcctcaagccatcctcctgcctcggcttcccaaagtgctgggattacaggcgtaagccactgtgcccagcctgtcaatttctttattgcaccttctacaatctgaaattatcagatgcaactggattccttgcagataaactcagcaaagctcactttgttgatcctgttcatctttataagcctagctgcgtgcctggccctcagtagtcaagatttaaatgaatttaaatgaagctgagggttggaggtgggtttggagatggacttcctgctagagttgggatgccaagtgaagtgagggctggggctggagctggtgctgggtggggttgggtatgagagtcagggttactttaaaaggctagggccatgtgtggtggctcatgcctgtaattccagcactttgggagccaaggcagggggattgcttgagcccaggagatcaagaccagcctgataatatagcaagaccccgtctctacaaaaaaaaaaatttttttaattagccaagtgtggtggcacgctgtagtcctagttactaagggagctgaagtgggaggatcacttgatcctgggaggtggaggctgcagtgagccatgatctcgccactgcgctccagcctgggtgacagagagagaccctgtctcaaaaattaagaaaaaaaaaattttttttaaataaataaaactgggctggttgcagtggcttatgcctataatcccagcactttgggaggccaaggtgggtggatcgcttgaggtcagaagtttgagaccagcctggccaaactgatgaaaccctgcctctactaaaaacacaaaaattagccaggtgtggtggtgcatacctgtaatcccagctactcgggaggctgagacggaagaaatcgattgaacccaggaggcagaggttgcggtgagccgagattgtgccactgcactctccggcctgtgagacagagtgagactccatctcaaataaacaaacaaacaaataaataaataagataaactgtgttcaagtgctcaggcacagcctgagggggatgcgtgatcactggcctaggcaaagtccaggctgggatcagggttggggtcaacattaggatcgggggctgggcttagggatcacagctccctcctggatccaagggttaagattcaaaggtctgaatgccccagttgaaggaatgaattcaccagacataggttgtggaggaagggctagctggatgaccaggtcgggaggcagaggaacaggccttgccccccagctcggcctctgcaccgcggacccatggtcagcagtggcccatcatgtactgggatcgtgcaggatttccaccccgccttatttatttatttatttatttatttatttagagacggagtcttgctctgtcgccaggctggagtgcagtggcgtgatctctgctcactgcaacctccgcctcctgggttcaagcaattcttctgcctcagcctcccgagtagctgggacgcaggcgcttgccacctgcaagcgcccggctaattttttgtattttttttagtagagacaggttttcactgtgttagccaggatgatctcgatctcctgacctcgtgatctgcccgcctcggcctcccaaagggctgggattacaggcgtgagccaccgtgcccgtccccctcctttttaaaaattattttttttattttgatttagagacagggtctcactatgttgcccaggctggtctcgaactcctgggctcaagtgatcctcccgttctggcctcccaaagtacggggattacaggtgtgagtcaccgcgtccagccccctttttaaattttattattattttttattgaaatacaattcacatacataagagtcacccttttcaaacagagtccggtaggttttagtatattcacaaggttgcagcaagcgtcaccactatttaattccagaacattctcatcaccccaaaaagaaacctggtacccatcagcagtcatttctcattccccagcctccaacccctggcaaccattaatctactttctgtctatggatttgccaattctgaatatttcatatgaatggaagcatacagtaagtggtcttttgcgtctgacttctttcgctaaacatgctgttttctttttttcttttttgagacggattctcactctgccgcccaggctggagtgcagtggcgcgatctcagctcactgccagctccgcttcccgggttcacgccattctcctgcctc[212 bp omitted]ctgtaagcctcggtccccccacatctgggaaatggggtggggacgctgttggggaagggagggcaggggtggaccctggagtgtgtggggcgcgtgtagggaggtgatcggctgcccccgtgtggtgcacggtagaactgcagctctcagcgccaatgcagggaacgggttgggggcgctcagcccctctagcctacccccaagacccccactttcaccctgcggcgtccctgggatcacagtacgtctagaacactaccccggaactccaccctctctgccactgtccctgaggctcctcgggccatatttgccaaatagtaataataatgtccccacatatgaattttgaatctggtcccctgtgaagcactttactcaaagattctcatttatttgttagcagtaacattaaaataacaaataaatataaacaaattgacaaataaaaatagtagcagcctgaggttgctgctattatttttcggagacaggaaaccacagtggttgagagagggtccaagttctggaacttgggagcacttggattcaaattgtagccctgccactaatttgccgtgtgaccttcagcgtgtgacgtttctcccttccttgggcctctgtttcctcatctgcaaatgggattgataaagatgctccctacctcttggggtggcagaaaggagaaactgctcagagcctggcacaagggcaactgccatgagtctgtgttgctcatagtatcaagcagtgctgtgctttcacaaccagcttttggctgagtgcagggtagtcccagcactttaggaggccgaagtgggaggatcgcctgagcctgagagttggagatcagcctgggcaatatggctacaaaaaattagctgggcgtggtggtgcacacctgtagtcccagtgacttggtggggctgagctgggaggattgcttgagccggggatgtccaggctgcggtgagccataatcgtgccactgcactctagcctgggtaatgcagtgagaccctgtctcaaaaacaaaacaaagcaaagcaaaacaaaacacccccagctctctgcaggtgggggtgtggagccttaatttgtagcatttgccaatttccatggtgtaaatattcccaccatggctaatttcaagctaccaaggtgatatcacatggcatttttgccccccattatatagtaattttactgtgcagctacaatagacgtaggtaacctcaagatcacagataatggcaaatgtagtaagataactaggacgtgatgagtatgtattacttgtacctttaatgtaatttaattgtatgtttgcataatttaatttttaataatggctgtgtttaacaaccagttccaaaattcctgagacataacaatcagctcgctccagccagatccagcacactgctgttttagaaggggaaactgaggctcaggaaaataagcctcagatagaagaaggcagggcacagaccccttcccaaaaccatgtgactcccaggccaagactatgtaatgcctgtctttctttcatcccaccctggtccacagagcatggatggtccccacagcgctgtgtggcctccgagaggctcttgtcctctctggtctcagcctgcccgcatggggagtggctgtgccctgcaggcgaatacctgcacagggttccttcgcacctgccagtgagcaacacacggattcttcctttcactttacaaactgggaaagtgaagcccagaaagggcaagtgcttgccccgggtcatacaggtggacagagagggtccccacaccccagctggggtgcaaaggagtggatgctgcagccccaacctgcgggtctggatctatgtggctgagtggaggcagcctgactagggaggtcactgagccctcagcagtggccaagccccgcacaccatccccttcacccaccccacccttaggcctccgaggggagagcttcccccgctcccccccgccaactggggagagaatgggccagggggagggacaatgtgggcagcgcctctggggtcttctctggctcagtccctttatctctatctcttcacagatctctgcgtctctgtatctctttgtctctccctgtgtgtgtgtggggtctctctcagtctttgtccctctgcgtctctgggtctctctgtctctgtctccctgcgtctctctctctctgtcatctggctcttccttcatctccttgcgcctctccacccttttgtaactcgtctctctctcttcgtgtctctctatctctacgtctctcgatctctctctctgcgtctctggcgctctgccccggcctctctctccccttctctcctctccagtgcgcctctcgtctcgggcgagaacacgctccccgccggcgtgcccagacccgcctccgcccccggagcccccggagcccccggcgccccgaccagcccgggcctgcgcctttaagggccggcggcggggggcggggtcccggcgccccgccctgcccgcccctccccctgacgtcccttcctccctccccagcccctccaccgcctccctccgccgccgcttgggccggctccgcgccccctccgcggcccccgcccgcccgcctgcccgccgcccccatggcgcccggggtccccgctgcacggggccactaggaccctcggcgtcccttcccctcccccgccctgccccctctcccgccgcgcggacccgggcgttctcggcgcccagcttttgagctcgcgtccccaggccggcggggggggaggggaagagaggggaccctgggacccccgccccccccacccggccgcccctgccccccgggacccggagaagatgtcttcgcggacggtgctggccccgggcaacgatcggaactcggacacggtgagtggggcccggccccttggggagccctggctgggtccagccgccaaacccttctccccgttgtacccctcgccccgcgagcccctaccctcgtttcctgggcccgacccggctcgtcacctctcgacccctcccggacttccaggcctctccaccctccccaccttttccagcccagcccgacccctgggggcgcccctctctcgggacccctctcttgtccccgtgcagaccgcttccgctcgggtctgttccctccaggaagccccttcccctgcttccaggagcccctcccttctcttgcctgtgctaagccgtttcccctccaggccgtccgcgtccgacacctcgccccctcccggatttgcagggcccctgaccccccaaggcccggccctggcactctcagcagggcctggcccagtcctgcctctggctccggccttccctgtctggggctgggtgccggctccccaggagcccccctcctcttattcccagccctctgcccctccaggacgcacccagggcgcctgtgggcagcccctggcaggaagctggtttccacctctcctgggccccggcccttttctggcttcttcaaggtctctcccgtcccaggcctggtccccatcttccaagcagccctgtccctagatcccagcaccccggggcccccagatgccacctggaccctttctggtctcttcctctcccaggaagccttggcctccaacttctaggccctcacctcacccaggctggtatttctaggccctggaccagtctgactccaggcctcatccgccctctatcaacttctcagcttcaggcagccccttccccaacccccaacctctggaccccctgctaggccaaactcagaccccttccccacaaaccaccgtcctttctcctgccccagggcctcccccttccttgctgggagtctggccttccaaggaagccccctcctcagcttcagaggccttcctcagctacagggcctggccccagatccttcttccagaaaactcctggacctgaagcctctcgtcttgccctggtttcaagcccttttcccttgggtcaatctgctggaagctttctccccaaatttctagaccccttgaccttccccagggctcagcctttattcatctgggctgctccttgcccaagaagttcctaccccatacttccaggccccccagacccttctctggtttcaaggacttctcctagaagcccccttctctgattcctaggagcttccccaagacccagggattcctggcctctgacttccactgcccccatggctttgtcactttccaccattcccaggcgccccctgcccctacactgcttcccagagaggcccctccccatctcctgtgtctctgatcactgatcacttccaaagacctgcccaccacccaatcctagacttctccccacctgggatctttgtggctttctccaaatccttctgccaggtccctgttccccttccccctgtttccctcacctccgacagacccccccacacacacacaccatcagagagatttatatctgtcccttcctcatcttgcagatccctccctcacagagaccaccccgcatcatcactatgggccagaactccaatttggagtctaatgaaatgcctaccacctctgttccttggtcactacaatctacagtgaggtgccaggggctccacagtcctgggttccaatgctgacatggccagctggtttgccttgtgtcctcagacaaccagttctccctttctgagcctcagtttcctgccctggaaaataggggtgaccgcttgagtgcctccaaggcttactcgattcaggcgaaggctggcacctaggaagcactccacaaatgccagctgctattgtggctgtgggtatgagtcagacagcccgtggattctcagctcagggctgttattggttgttgagtgagcctgcagattcactcccagcttgcagcctcagtttccttatctctaaatcgggttgatgatggccccccactgttagggatgtttgcaggagccagcgacgtgatgtgactaaggtgcacagggcctggcatgtgtcgtggctgttgtggttattagcactactttaattgttcagataaacttgggttcacatcctgtttctgtccctccctagctgtgtgacctcgggcaagtaaccttacctctctgagccttggtttccttgtctgttaagtggaacgcctaatgaagacttgctgttccctgggttgttaagatgcgtgcatggtgcggatttgaggatggctaatccccttttctctcctccaactcttgtcactaagacctgcctgtcagtcctggtggggagtcacttgcctgcctctggaatgggaggttgcagccccctctcctgttacctggttaccatggctacagccacgtggggtcatgctcccccaccccaagttccagggccccccaccagggggccagcctccccaggttccctagcaacagtcccgggtgttggggcgccagccgggcgggagggagccaggccagctggtggtgcaggccaattttagctcccacccccggcccccaggggctttgtcacccactgccccagctgcccctcgcaggggtccctcagccatgctgccttcagcgtggtgccatcccacctccagctggctgccctggcgccacctgacagggcttcttctccaggtccttatcttggtggggatcggaggccttatctccaggatctccacctgcctccctggtctctcctgggaagaagcctgggcctgtggggaagcctggctcagcactcaggaggaatcagcaggccggggttcgcatcccagcactctgctccatctgccctgtgaccttgggggagggactccccctgcctgagcctgggtgtccccgtctgaagactgcagatcataattggacccacattggaggccagggtgagggcacggcaggcagtggcggacgcgtggttagagccctggccgtggtggttggaactgcccagctgtggggaggttgtctttctgcccctgtgaatggactgtgtgaccttcacatggcaccttccctctccaaggctcagtttctctgctggaacatggagtcattccctgggctactgcaggaattaagtgtaggcgagttacctgtttacacaggacttggtccatagcatgagctgctttgtagaaatggttcatgacccagcgtggtagctcacacctataatcccagaactttgggagacccaggcaggaggatggcttgagcctgggagctgaagactagcccggacaacatagcaagactccatctctacaaaaaaatttaaaaatcagctgtgtgtggtggtgcactcctgtggtcccagctactcaggagcctgagatgggaggatttgcttgaacccaggcagttgaggctccagtgagccttgattacaccactgcacttcagcctgggtaacagagcaaggccctgtctcaaaaaaaaaaaaaaggttcaggtgtgagaggcagtgtggtattgtg[132 bp omitted]tgaaaccccctctttactaaaaatacaaaaattagacggttgtggtggcgggcgtctgtaatcccagccactcgggaggctgaggcaggagaattgcttgaacccaggaggtggaggttgcagtgagttgagatcgtgccattgcactccagcctgggcaacaagagtgaaactctgccaaaaaaaaaaaaaaaaaaaaaaaatactggtggaaactgtttgggttcagatcgtgggtccgggtctcactttccccacctgtaaaatggagataatagtgtggtaatggcctcatattgcatcaatgaccagcattaattaaacgttagttgtcgttgctatcaagtggcccggcagtgtctttctcagagacttgggcccccagcccatcagcctcttggcctttcttcctcccctcctgttgtcctcctgcttcccactcccagccggaagggcacaggcagaactgccttggcgggaggcctcaggcaccctgagccccagccctgaaagggagacagtccctggggcttccaatcaggccagggcagctcagagcaggcaggtgacctgcgggggagagaggccagggagggacaggacagtaggaacagaacatcaggaggagagaagccatggtgtgggagacagcaagtcagggcgcttctcaagccctgggtgtttcagggggtggcagaagcaacagtgtttcccatggaaggaggataacagggattcaaccaggtctcagggccagtgaaagacttggttaccctgcagggggtggtggctcaggcctgtaatgccagcactttgggaggccgaggtgggtggatcacctgaggtcaggagttcaagaccaacctggccaacatgatgaaacctcgtctctactaaaaatacaaaattaaccaggtgtggtggcacatgcctgtaatcccagctactcgggaaagctgaggcaggagaatcgcttgaacccaggaggcagaggttgcagtgagccagactgggccactgcactccagcttgggcaacaagagtgaaactctgtgtcaaaaagaaaaaaaataagacttggttacaatgtttggagtccaatctggggtaacagtgattggaatcaaatgttaggggcattccactgggaatcaaatgttgacatttgggtttgaagtagaatttgggggctggagaggggacagttgatgggtaaaatagcaagtcaggaccagtggtggtggaggaggagcctcgagtccagattgaggtcagcgttgattggggttgagggcagcctcatttagggcaaaatattgtagagttgatccaggctccaggacaggcatatcctgctttttcgcactttgccttattgagcttcacagatacagtgttttctacaaattgaaggtttctgacgaccctgtgttgagcaagcctgtaggctccatttttccaacagcctgtgcacaatttgtgtctctgtcacattttggtaattcacacagtatttcaaactttttcatcattattataatagctgttatggtgatctgatatcagtgatgtttttcctcttttttttttagagacagggtcttgctctgttgcccaggctggagtgcagtggcatgatcatagctcactgcagccttaacctcctggggctcaagcgatcttcccatctcagccccctgagtagctgggactataggcatatgccaccatgcctagctaattttttttttttaagtttttctagagatgggtgtctcgcttcattgcccaggctggtctcaaactccctggcttcaagcgatcctcccgccttgtcaatgattttgttttattgtgattcactgaaggttcagatgattgttagcatcttttaacaagaaagtattataaaattaaagtatgtacattgtttttatagctgtaatgctattattgcacactcagtagactgcagtatgatgtaaacacaatttttctttctcttttttttttttttttttgagatggagtcccactctgtcacccagactgtagtgcagtggcgcgatctcagctcactgcaacctctgcctccctggttcaagtgattctcctgcctcagcctcctgagtagctgggattacaggtgcgcgtcaccatgtccggctaatttttgtatttttagtagagacggggtttccccg[194 bp omitted]tcctgggttcatgccattctcctgcctcagcctcccaagtagctgggactacaggcgcatactgccacgcctggctaattttttgtatttttagtagagatggggtttcaccttgttagccaggatggtctcaatctcctgacctcgtgatctgcccgcctcggcctcccaaagtgctggaattacaggtgtgagccaccatgcctggccttttttttttttttttagaccaagtctcactctatcactctggctagagtgcagtagagcgatctcggctcactacaacctctgcctcccaggttcaagtgattctcctgcctcagcctccagagtagctgggattacaggcgtgtgccaatgcctggctaatttttgtatttttttagtagagatggggttttcaccatattggccaggctggtctcgaactcctgacctcatgatccacccacctcagcctcccaaagtgctgggattacaggcctgagccactgcacctggccacctggcccataatttttatatgcactgggaatccaaaagattcatgtgcattgcttttttgcagtatttgctttattgcggtggtctggaaccaaacttgcgatatctctgaggtatgtgtgtaattagaaaaggaggttggggctggatgcggtggctcacatctgtaatccgtacagccgaggcaggtggatcacctgagtcaggggtttgagaccagcttagtcaacatggtgaaaccccgtctctactaaaaatacagaaattagccaggcatgatggtgcacgcctgtaatcccagctgctcgggaggctgaggcaggaaaatggcttgaacccgggaggcagaggttgcagtgagctgagatcgtgccactgcactccagcctgggtgacagaggaagactccatccgaaggaaaaaaaaaaagacaaggaggttgggggtagtcagactgcagtgagggttgaagaaggggtgtgatgcctggggccctgaatgttgcagatttggaggacatgggggcttttgttcctggaggcgtctttttgtagagaaagatgaaggatgcttggctctctggggcctgagtttgaaaagggccacggaggggccggtagccaggcctcaagttaagtgcactagcccacgggttccacggaaggtgggattggatagctcatgctccatctcccccgcccagcatggcaccttgggcagtggccgctcctcggacaaaggcccgtcctggtccagccgctcactgggtgcccgttgccggaactccatcgcctcctgtcccgaggagcagccccacgtgggcaactaccgcctgctgaggaccattgggaagggcaactttgccaaagtcaagctggctcggcacatcctcactggtcgggaggtgagtatgggcacagggtggggctcggggcaggtccctgtgggaccaggtcttcggtgtatgttgatagaggtcaggattggccctgggtttgctttgtggcctcaggtaagttcccgactctctatgggacaggtcacaatatctctgatgttcccagaaccacccccatgggaaaagagaactaatttcatgtatccctgaaattgccgggaaatctcagatcacaggcagtccaatgtgtgcgttgctaaggatgcatgtggcttttgtagataaacctgagctgtggccggatgcattggctcacacgtgtaatcccagcactttgaaaggccaaggcaggaggattccttgagctcaggagtttgagaccagcctgggcaacatagcaacactttgtctccactaaaaaataagtaaaattttttaaaaattagctgggtgcggtggtgtgtgcctgtggtcccagctacttgggaggctgaggcgggaggatcgcttgagctcaggagtttgaggctgcggtgaggtgtgacctcaccactgcactccagcctgggtaacagagtgagaccctatctcaaaaaataaaaataaaataaaataaaagagggctgggcatggtggcttacgcctgtaatcccagtactttgggaagctgaggcaggtggattgcttgaggtcaggagttcgagaccagcctgaccaacatgatgaaaccctgtctctattaaaaatacaaaaattagctgggcgtggtggcacatgcctataatctcagctgctcagtaggctgagccaggagaatcgcttgaacccaggaggcggaggtttcagtgagccgagatcatgccactgcactccagcctgggtgacagagtgagactctgtctcaaaaaaataaaaaaattaaaaggccgtgcgcggtggctcactcctatagtcccagcactttgggaggccaaggcaagtggatcacctgaggtcaggagttcaagaccagcctggccaacatggtaaaaccccgtctctactaaaaatataaagattagcttggtgtgatagcaggcacctgtaatttcagctacttgggaggctgaggcaggagaattgcttgagcccaggaggcagaggttgcaatgagccaagatggtgccactgtattccgcctgggcaacaagaccgagactttgtctcaaaaaaaaaaaaaaaaaattggccgagtgcagtggctcataccaacaaacacagcgctttgggaggccgaggcaggtggatcacctgaggtcaggagttcgagaccagcctggccaacatggcaaaaccccatctttactgaaaaaaaaatacaaaaattagctgggtgtggtggtgcgtgcctgtaagcccagctacctggaaggctgaggcaggagaatcactggaacccaggaggcgaaggccgcagtgagccgagattgtgccactgcactccagcctgggtgacagagcaagaccatctcaaaaaataaataaataaataaataaatagtaaataaattaaaaataaaaaataaataaacctgagctgcctctctgttttaagggtggactttggttccttgaaatcttcctgtgatctggagaacacagcaggtttatttatgttgtattctcagttacacacagcctcactctccccaccacctcttccagagcaggcatctgtgctgagtatggtgacattattgcaaaaagggcccacacaggctttgcagcctagatatgaggtctctaactcacttagaggaaaaggaatggtgggtgatttcatgatttccccacccctccttcaacttcagagaaatgattggaatgaattatcctgccttggatggactctcccctgccctcacgctgtctacaccatacacgcaaaagacaccgggccccgatggtcttacaggcaaatcctaccagatgttcacattttatgccagttcttccagagactaaagaaagaactgccactgcctgactgatttttacgcgctagtttgtccttaagagcaaaaccagacaagaaacaaaattacaggccaatctggtgaacataggtataaaaatcttatacaaaatattaacaaacagaacctggcaaatcaattaaagaaagctgtgtgatgacgaaactggctttatctcaggaatgcaaagttcttttccctttgacaatttattcatgtacttcaccacattctcagattaaagaagagaaaccatatgatcgtctcaatactggcataaaaagtgtttgataaaatttttaaaaacacattcgtgagaatatgaggaaagctaaggggctctctcttccatgaagaacacatggttccctatatgtggatctggttccaggggtttctgagagggacctggccccatctctgttttaaaaataaaataaaagttttactgcagactgggtgcggtggctcatgcctgtaatcccagcaccttgggaggctcaggcaggcggatcacctgatgttgggcgttcaagaccagcttggccaacatggagaaaccccgtctctactaaaaatacaaaattagccaggcatggtgacgcatgcctgtaatcccagatattcgggaggctgaggcaggagaatcccttgaacctgagaggtggaggtcgcggtgagccaagattgcgccattgcactccagcctgagcaacaagagggaaactctgtctcaaaaaaaaaaaaagtttcactgcaaaagaagtataaggagagttcaatgacattctgatttcctccccatgatgtatctcaaagctgttttaaaagttgtgtttaagaggtagattccatcaggctgcataagttcaaatctgggccacaacttactacaatttactagccatgtaactttggccaaatgactaaacagctctgtgcctcagtttccctgttggtaaaatgatgataatcctgttagccaaatgttggtggcatgtgcctgtggtcccagctacttgggaggctgaggtgggaggatcacttgagcccaggaggtcaaggttgcagtgagctatgatcacaccactgtaacaccactgtactctagcctgggagacacagcgagactctgcctccaaaagaaaagggggcgggggggtggggtgggtgcggagaatgggagggataatcctagcacttatctcacaggttgttgtgaagattaagagttctcgtttgtaaagcgcatagtccttgtagtgagggcttagtgcatgttaaccagttgttatttattccactgttcatttgttcaaaacaaagatgtgatgggccagtgatcttcattgccctcacaaagggatcccctcaaggtctcgtccatgcccacatccactcaggcagctctggagcagcgtcagccaggccctgctgtggaataaggatatttctctgcagaagtgagggtggcagtggagacagtgaggacagcttgtgcaaaggccctgaggccctgagttccccatccacagggtatggcccagagtgagggctcttctgggagagggggcaaaggaaggatatcccagggtgatctgagctgggccagctggagtgcagtgacgtcatcttggctcactgcaacctctgcctcccaggctcaagcgattcttccaactcagcctccagagtagctgggattacaggtgcctgctaccacacctggctaatttttgtatttttagtaaagacagggtttcgtcgtgttgaccaggctggtctcgaactcctggcctcaagtgatcctcccgccttggtcttcccaaaatgctgggattacaggcctgagccaccatatccagtggggcttgtggcaccttgaccgtccctcctcctttcctccccctctaggttgccatcaagattatcgacaaaacccagctgaatcccagcagcctgcagaaggtgaggctggggagacgggggagagcaggagccaggcttccggcacagccgggtgacccacctgacccttcctgcgggggcccggctggggaaaggatcccccaagccacccaccctcactctcctctgtcttcctttctggccacgcccagctgttccgagaagtccgcatcatgaagggcctaaaccaccccaacatcggtgaggagggaatgggagcaggggcaggccaccaactggaacacttgcaaaggagttgggggtggtggcagtggttagaatagttggagacccaccaggcgcagtggctcactcctgtaatcccagcacttagggaggccgaggcgggtggatcacttgaggtcaggagttcgacaccagtctgaccaacatggtgaaactctgtctctactgaaaatacaaaaattagcagggcatggtggcgggcgcctgtaatcccagctactcgggaggctgaggcaggagaattgcttgagcccaggagccagaggttgcagtgagctgagatcgcaccactgcaccccagcctgggcaataaagcgagacttcatctcaaaaaaaaaaaaaaaagaaaaagttagagacctggtttctcatagttgcatcactgctgtgtgaccttgggcaagtcacttaacctctttgagcctctattttctcttctggagtaggggtgataagagggcctattaccaggtcattgtgaggattgacaaagatgatgcatccaaaatgcttagtttgggctgagctatgggacttggtccagttatttccaccagcatcaacatcctcactgtcattatcattgggcagaggcgggagtgaggggtctttagtgagagaagcggagtttagctccgcctggatgtggctgcagcatttgttcattcattcattcatttactcagtaattattgattgagtggccgctatgtgccagaccctggggacacaacagggaagacaacaagacacaaatctctggcctcatggagctgaca[139 bp omitted]gtatctattaaaaatacaaaattagccggatatggtggcgcatgcttgtaatcccagctactcgggaggctgaggcaggagaatcgcttgaacctgggagggtgagcagagatcgcgccattgcactccagcctgggcaacaagagcaaaactccatctcaaaaaaaaaaaacgaaagtggaaagggtggtagagggggctgaggagtttggaaaatcttgctgtcagtagggagccattgagtgttgagttggggtgggggtgttatggttggcacatttgcatagttactgaggacaggttaggaggggccctttctccctaatgccctacactgttcccaaccattatagtgaagctctttgaggtgattgagactgagaagacgctgtacctggtgatggagtacgcaagtgctggtgagccgcccaccctctccgccctgcccctgtgccacctccccctgccgctgcacctgaccctgaccccgctcggcctctgccctgcaggagaagtgtttgactacctcgtgtcgcatggccgcatgaaggagaaggaagctcgagccaagttccgacaggttggggcagggctgagggtggggctgactgggtgcctgggtccctgggagggcgtctgagagctgggcatggtctgggctgtccagcgacctgggggcggggcttaagtctgggcaggggtgaaggtgcagagctgggtgtgctgggcatatagttgcccagatgtgagggcatccggatgtaggtttgcaggtgccccgttgggtgggtgagaggatgtttgggcatgaaggcgccccggtgggcaggtgttgcatgtgtagggcatgtgggtgtgcccagcgcgtaggtgtgtgggtgatgggggcacgaaggtgccagggtgccaggtgtgagtgtgccggagtgtgattcaaaagatgtgtgggcagtagctatgtgggtgcccaggtatgtaggtatgtaggtgtgtggggaagagagtgtagggcaccccaggtagatgggcaagagagggctgaggggtggttgtgtaagcttgtaggtactagggcatgccggtatgtgggtgcccgggtgtgcgagtgcccagatgtatgggtttccaggtgtgtggtagtgaggacacccaggtgtgtaagagtgtggggggggccaggtgtggagtaagaggacgtgcaggtgtgagggtgcccaggtatgtgggataagaagaagtgcaggtataagggtgcccaggtgtggggtaagaatatgtgcaggtgtgagggtgcccaggtgtggggtaagaggagatgcaggtatgaaggtgcccaggtgtggggtaagaggagttgtgggtgtgagggtgctggggcatgaggggtaagaagatgtgcgtgtgtgagggtgccaggtgtgtggggtaagaggagatgcaggtgtgagggtgccggggcatgtggggtaagcagatgtgcaggtgtgagggtgccgggcatgtcggctaggaagatgtgcaggtgtgagggtgtttctgccttgacgctgctgtcctgaactcaagggccataagccctggtgagttggggcggcctgtctatctacaggtatgggatatccccatgggagtttccagatgtgaaggtcaagagaggctggtccccatgccttggttccgacatccctgggcatgggggtgtcctgggggagacgtgtgtctgcccaggttccacgggcacctcttgctgtgactgaatcagggtgtgaggccccagatctcaggctgtgccttggggaggcctggggcccagctgtgagtggtttcacagtccactgagggaggctgagggttttgggagccacaaataaccaaccttccccttccctcccagattgtttcggctgtgcactattgtcaccagaaaaatattgtacacagggacctgaaggtaagcccccgacccgctgtgatctcagggaccacggctcagcccacagacttctccctgcccccacccctccatggtttccgtggcctccagcaaattcctccagcccttttctcctcctgctcttccctccacacccagcacccccttgaccctttcccaagcttttgtggcagaaacaaggccagcagatgggggagcggatgggggggaggggacaggaggagtgaacaaagcagggagaaacaaagtgtcccaaaatggccctggatgctacagggctgttggataaggacgctgggacatgataaggggtttgtcgctctcagagcctttgggaccttggcattctccgaccttaggacattcaggactccttgaggatttaggttgcagagc[133 bp omitted]gctccgcctcctgggttcacaccattctcctgcctcagcctcccaagtagctgggactacaggcgcccgccaccaagcccggctaattttttatatttttagtagagacggggtttcaccgtgttagccaggatggtctcgatctcctgaccttgtgatccgcccgcctcagcctcccaaagtgctgggattacaggcatgagccacggcacctggccgggaatctgagaacttaagaaggcttcgtttttatttttatttttgacatggagtttcacactgttgcccaggctggagtgtagtggccccatctcagctcgctgcaacctccgcctcccgggttcaggcgattctcctgcctcagcctcccgagtagctgaggtcacaggcacctgtcaccatgcccagctatttttgtatttttagtagagacggagtttcaccatgttggccaggcttggtcttgaactcatgacctcaggtgatccacctgcctcggtctcctagagtgctgggattacagatgtgagccaccgtgtccagtctgagaaggggctttgagagaaaagccaccttggccagtaccaggcaggaagggactcaacggggctccagcccagctacctgtaggagctgagccaggcagcctcctcgagtacctgtggccccagggtccgcattccacaccttccgctgtatgtctcagtcctcgcgctccaagaccaggtggctgaccgtttggttggctcaaatccggttgtcttgactgtcgttttgtgagcacctgtgtgctaggcggcatcctaagtgctttaaggaagtgcttctggaactatctgtgaggaaggactgggttggttttgttgttttgttttgtttttttgttgcccatactgaagtgtgatgtttccatcacagctcactgtagcctcaacctcttgggctcaaatagttctctcacctcagcctcctgggtagctggaaccacaggtgtgagccacaaagcctggctaatttttgagttttttgtagacaagggatctcactctgttgtccaggctggtctcgaactcctgggctcaagagattctcctgcctc[135 bp omitted]ggcctcccaaagtgctgggattacaggtgtgagccactgtgcccagccacaaaccccattttaaaagctattattagattctaaagaaattccacagtcaaattcctatggaggaccaggcgcagtctcacacctataatcccagcactttgggaggctgtggtgggaggattgcttgagcccagaagttcgagaacagcctgggcaacacacccaagacctgatctctacaaaaaataattgtaaaaaattagcttggctggacgcggtggctctcacctgtcccagcactttgggaggcctaggcaggcagatcactggaggccaggagttcaagaccaacctgggcaacacggtgaaactccatctctactaaaaatacaaaaattaggtggtcgttgtggcgcgtgcctataattccagctgcttgagaggctgagacatgagaattgcttgaacctgggaggtggaggttgcagtgtgccaagatcgcgccagtgcactccagcctggacaacagagcaagactccatctcaaaaaaaaaaaaaagaaaaaaaattagcttgtatgcctgtggtctcagctactcaggaggctgaggcaggaggatcccttgagcccaggaggttgaggctgcagtgagccatgatcatgccactgcattccaacctgggtaacagagcaaaaccctgtctctaaaaacaacaacaaaaaatacaaaagcagaaagtgcatctgaaaaaaagaaaaataatacaaaatgaaaacaaaaaacaaattgctatagaggttcaagtgctaaccctctcttcacttccttccactgggctagggtgtccctccacacggccctggaggcagcaccttagaggcttccatgattcacctggaggtcgtatgtcccctggtggagggtccccaaagcagctaacacgagttttggggtcgtattagtacaccaggggtaccaaccaaggggaccaacccatgtgactttggggctggattgcggagcctcaaatggcaggaaaagaaatgtaatccctggcctggcgtgacggctcacacctgtaatctcagcactttttgggaggccgaggtgggcggatcacctgaggtcaggagttcgagaccagcctggccaacatggcaagacctcgtctctactaaaaataaaaaaaatagccaggtgtggttgtgggcgcctgtagtcccaggtactcgggaggctgaggctggagaatcgcttgaacccaggaggaagaggttacagtgagccgagatcgtgccactgcactccaacctgggtgacagagtgagactccatctcaaaaataaaaaataagaaaaagtaagccccgagcaagccagatgctattacattcaggtttagggaggagctctgtggtgtgtctttgtagggtttgggcctttattggggcaggagctggggaagagtggtccagaaataaaccaggagacatagggagacctgggaggaagccagggatgctggtgacctgggcgagggaaggaccgcagttgggatgggccagacgcgggtgacattttgaaaggtggaggtgtgcctctgtttgtagtcagaaggctggaggcttcttcctccgcgcactgtggaaacgggtggccttgtttagattctagttgtgctgctttcttgcaatgggcatgagttgtggcctcccacagcttctgtttcctcccctgtgaaatggcaattgcaagaccgcatgccgcaaaaaaatagacaaaactttataacaatacaaaacgtttatttatttatttattcacttatttttgagatggagtctcgctgtgttgcccaggctggagtacagtgatgcagtttcagctcacgcgattccttgcctcagcctcccaagttgctgggattacaggcacccgccaccacgcctggctaatttttgtattttcagtagagacagggttttaccatgttgcccaagctagtctcgaactcctgacctcaggagatctgcctgccttggcctcccaaagtgctgagattacaggcgtgagctaccgcgcccggccatgaaatgtttactgatcactgactgtgctctaggggccgctgtgagcactttacgcttaaacccacaaccacgcttgaggcaggtgtcgagatcaccctcagtttacatacaaggaaactgaggcacagagaggtctggtaacccacctaaagttcacacagcgagtgagtggtggagctgggatttgcagctggaattctccgagagtctgtcgtttcaccttcacgttatgcagacagacactgttataattgatagtccacagagcccagtgcatggtagatatgcaaccaggattaaattattgctttcgttttcctgggtcttgagcaatcaggccttattttgtttctgctgggtaacttgaggctccaagaggggcaggagattacctgaagacccctagatctgcagaccacatggggtaatagtgatattacatagtactcgctgggtatgaaatactgttctagcttttctttttttttgagacaagttctcactctgttgctcaggctggagtgcagtggcacagtctcagctcagtgcaacctctgcctcccaggttcaagcaatttttgtgcctcagcctcctgagtacctgggactactggcgcacaccaccatgcccggctaatttttatctttatgtttttttgagacggagtttcgctcttgttgcccaggctggagtgcaatggcatgatctcggctcaccgcaacctccacctcctgggttcaagcaattctcctgcctcagcctcccgagtagctgggattataggcatgtgccaccacgcccagctaattttgtatttttagtagagacggggtttctccatgttggtcaggctggtcttgaactcccaacctcaggtgatctgcccacctcggcttcccaaagttctgcgattacaggcgtgagccacggtgcccagcccaatttttgtatttttagtagagatggggattcaccatgttggccaggccgatcttgaactcctgacctcaggtgatccacctgccttggcctcccaaagtgctggtattataggcgtgagccactatgtctggcctgtgctaggttttctatgtggattaactcataattctcaaactacgctatgaaataggaactaagattatccccattctatggatgaggaaactgaggctcagtgaggtaaagttactacctaaggtcaggtagagagtaaaggacaggcccaagagttgatccctgtgggccagccctagagcctgtgctcctgtctgcctcccacgtccatgaaaggctttggccttgagtcccactttccgccctctccttctctccctgcaggctgagaacctcttgctggatgccgaggccaacatcaagattgctgactttggcttcagcaacgagttcacgctgggatcgaagctggacacgttctgcgggagccccccatatgccgccccggagctgtttcagggcaagaagtacgacgggccggaggtggacatctggagcctgggagtcatcctgtacaccctcgtcagcggctccctgcccttcgacgggcacaacctcaaggtaccgagaggggctgggtgcaggggcatcagcccctccccacagtcaggcccctatcccccccacacctcccctgcagagggcctcagtggtgggactggcctgagttctcatgggaagatgggggatgggcaggattcaagtcccctctgcagtgaggccagccgaatggactgtgccatgctggggttaagggcatgatctttgcagctgataggcttgagttcaaatcctgactcatccgttcactgagctaatatttatggcccacttctctgtgtcaggctctgttttgggctttgcatgtaaggcgagaacaagagaggcaaaaactcctgcttggccgggtgcggtggctcatgcctataatcccagcactttgggaggcggaggcgggaggctcacttgagcctgggagttcaagaccagcctgggcaacatagggagacgctgtctctacaaaaaatacaaaaattaaccgggcataatggcgcacgcctgtagtcccagctacttgggaggctgacgcgggaggatcacttgaacctgggagatcaagactgcagtgagctgagatcgtgccactgcactccaacctgggtgacagagggagaccctgtctccaaaaagaaattaaaaaacaaaccctgccctcgtatatgctacgctgtgggtgaaccttgaaaacattgtgctaagtgacagaagccagtcacataaggccacagaatgtatgattccattaatgtgaaatgtccagaataggcaaatccatagagacagaaagtggattactggttgcctgaggctgggggggaggagcaagttggaggttgattgctaaagggtactgaatttcttttgaggtgatgaaaaatgttctaaaattcaatgtagtggccggcctgatggctcacacctatattcccagcactttgggaggccgaggcaggcagatcacctgaggtcaggagttcgagaccagcctggccaacatggtgaaaccctgtctttactaaaaatacaaaaattaaccgggtgtggtggcaggcacctgtaatcccagctactggagaggctgaggca[149 bp omitted]ctaaaagccatcgaattgtgcacttcgcttcaaacaaaacagttcctgtcttcccagactaacattcctactggggccaggcagctaacaaaacaataagcaaactagatatgatatcagatgctggcctgtgctatgctggggggaatactgtaaggggatgggaggtgtgggctgagttgttgcttgctttttttttttccccctttgaactttttattttgaacgattgccaatctacggaaaagttgcaacagtagagcaaataacacatggtatgtttcaggagcttcacaatcgctggcctgtgtccacatttgctctatctgtctgtatttgcacatgatctttgctgccctcatcggcattgatggcgcatttgacagttagttgcagacgctgtgtccttttatccctaaaggcgagagcgggttatctcctgagaccaggggcgttttcctgttgacggtgacatacaggaaatacagcagtggtataatcctggcctctacgccatggcccatactcagatttcatccatcatcccaggaatatctttggcagctatttttttttcccagtcggggatccactcgggtccctgcgttgcatttagctgcgccatctcttgtgtctcctttcatccggaacagttctcagcctctcttttgtctttcatgacattgacattatcgattagttcaggccagttaattttgcagaacgtccctcaatttgggttgcctggtgtttcctctcgattggaatcgggggtgcattggggcaggaattctgcagctgggacgctctgtcctgctctgcgttgcccgtgaggagcacgtactgtgatatgaaattgtaaagtcagggaaatacttgcagaggacagaccatcaaagcggaaccctgagtgatgaagaggagggagtcccttcttcacagtggccttggccaaatagccaacccctctaagcctcagtctca[146 bp omitted]cccgtctcttctaaaaatacaaaaaattagccgggcgtggtggcaggcgcctgtagtcccagccactcgggtggctgaggcaggagaatggcatgaacctgggaggtggagcttggagtgagcggagatctcgccactgtactccagcctgggcaacagagcgagactccatctcaaaacaaacaaacaaaaaagatgataccaaccttgtggcagtgatttttaaggactggctgagatcagggatgcaaagtgctcattcaagacagccttctggccgggcacggtggctcaggcctgtaatctcagcactttgggaggctgaggtgggcagttcacctgaggtcaggagttcaagaccagcctggccaacatggtaaaaccccgtctctaccaaaaacacaaaaattagctgtgcctggtggcatgcgcctgtaatccctgctactcgggaggctgagacaggagaattgcttgaaccagggaggcagaggttgtagtgagccgagatcacaccactgcactccagcctggatgacagagcaagactctgtctcaaaaaaacaaaacaaaacaaacaaacaaaacaggctctgacactccggccatagctgaagtctggggtggggaggtgttgtcacagaataatttttctgagcctcaagcatgaagctaagagacctttttgaagggccaggccagtgtcttacctgccccaggtccttgtcactttctgccatcctggtgtccccaccaggcaccccaggccttgctgtgcaaaggaggcacacagctgagaagaggcaggttctagctctgtcatttcctttctgagtgaccttggacatgtccttttctgaacctcagtttccccacctgtaagatgaagacactaagagtattcaggacaggtgtcgtggctcatgcctgtaatcccagcaccttgggtggccg[134 bp omitted]gatccaggagaatcacttgaacctgggaggcagaggctccagtgagccgagattgcgcccctgcactccagcctggacgacagagcaagactccatctcaaaaaaataaaaagagtttgacaccagcctgggcaacatttcaagaccacatctctacaaaaaatattttttaaattagcctggcattgtggtgcatgcctgtagtcccagctacttgggatgctgaggtgggagaattgcttgagcccaggagttccaggctacagcgaactatgatcacgccactgcactccagcttcggtgacagaacaagagcctgtctctttaaaaaaaaaaaaagcatctgcttgcagcccgtctgcatatgttaagcccttcactggagcttggcatctggccacagcatcatgcttgggagctgcgctggaggtggcagtggtggcctgatggtttcttctcccccatcacgtgataggcagtgtggcatggtggtcacacagcacaggctccagagccaaggctctgccactttctggctgtgcaatcctggggcaagtgaccaaacccctccaggcctcaacctcctcgtctggaaagtgggcgttataaccgggcttcgcggcgttgtgaaaatggatgtaatatgcataaagcacttagaacactgcctgctaaggggtaagtgtcctgaaagtgatccaaattaaatattaatagccctttatgatctgcagaggctccccaggcatgggcatctttcagcccttttaggagaatgctgcagcagaggactctgtcctaaaggagtcctgttcacccccaacgctcaattcattcctacctgttttctgcctcccttcgttttttttgttgtctgtttgttttttgagacaaggtctcagtcacccaggctggagggcagtggtgcagtcacagctcactgcagcctcaacctcccgggctcaagcaatcctcctgcttcagcctcctgagtagctgggaccacaggcatgtgccaccacacctggctaatttttgtattttttgtagagacagagtctcgctgtgttgcccaggctggtctcaaactcacgggctcaagcggtcttcccaccttggcctcccgaagtgctgggattatagacataagccaccacgcctggcctattgcggttttttattcagatggaaagagctccccctggtctgccaagctatggatttatcttatttttcacagctttggtagggcctctcataaaaggcccttaaagagaaagccagcagataaatccatgaatggccttgaggagtgtgtctctttggacagcaggcatggctgggggaggggagagacgagaaggcaggagaggcagtagggtctccttccccttgagtgaatctcatatttacataccgctctctggctctgggccaggcatgtggtaagcattttacagatttttttttttttttttttttgagatggagtcttgctctgccgcccaggctggagtgcagtggcgcagtctcggctcactgcaacctccgcctcctgggttcaagtgattctcctgcctcagcctcccgcgtagctgggattacaggggtctgctaccacacccagctaatttttgtattttttttttttttagtagagatggggtttcgccatgttggcctggctggtttcgatctcctgacctcaggcgatctgcctgcctcaccctcccaaagtgctggaattacaggcgtgagccaccgcgcccagccacatttttacggatattaactcacctgtaccctggtagcaagcatgtgaagtgggtcctgtaatccctttcacggataaggagaccgaggccccagtggctgactcacttacctacctccctcttacctgacttagagaataaacttccttttttttctgagacagaatctcgccctgtcacccaggctggagtgcagtggcgtgatctcaactcactgcaacctccacctcctaagagtttaagtgattctcgtgcctcagcctcccaagtagctaggactacaggcagccaccaccacacccagctaatttttgtatttttagtggagatggggtttcaccatgttagccaggctggtctcgaactcctgacctcaggcgatctgcctgtctcggcctcccaaagtgctgggattacaggtgtgagccaccgtgcctggccagataataaactttctctgcaagttttcctctgaatgaaaagttatgtagcttaaatttttttttttttttttttgtagagacaggctggttgttcaggctggtcttgaactcctgggttcaagctatcctcctccctcggcctcccaacgtgtttggattacaggtgtgcaccaccatgctcaggtcattttttattttttgtagagatgaggtctccctgtgttgcccaggctgttcttgaactcctgggctcaagcgatcctccggtcttggcctctacgcctggccaagaatttttttttttaaattgcagcgtccatatgatgttcccattttatggacagggaactgaggtcaggagaaaggaatggggttttgcttacctcgtcaaggactgggactcagagcttctgtcacttctatcaaaggggttgggacaaaggttgtgtgtgtgtgtgtgtgtgtgtgtgtgtgtgtgtgtgtgtgtgtgtaataggtggggggcggggcagaccccctcctccagtaaccccatccctgcaggagctgcgggagcgagtactcagagggaagtaccgggtccctttctacatgtcaacagactgtgagagcatcctgcggagatttttggtgctgaacccagctaaacgctgtactctcgaggtgagcccagcctcacagccagcgggagcccttctagtctcctgactcccctaaactctgcctgcccccacccacaaaagccttcttgacacacttttcctctcctgtgcccaccgaagatctgctgctggtgagtgggggtagacaggccgtccagggaaaagctcccaggcctgtcctgacgccacccccccgacaggctcacccactccctgccttgccagtaattagctaatgagctcctaggatgattacagggtgccagggacccagatgatgcggaggagggagggtggcatcaggaggctccggcaggggacgtgggggagagagaggcccaggaggcgctatctcttaggaagcccgcaattctgggtgttaggcctcggaggtttggggcagggcagaagctgtatgatttctggttccttctgacacctgtcttcccccttccctgctcctgatgcctgcagcaaatcatgaaagacaaatggatcaacatcggctatgagggtgaggagttgaagccatacacagagcccgaggaggacttcggggacaccaagagaattggtgagggtcagggagagccatcctgtcacccaggatggagtgcagtggtgcaatctcggctcactgcaacctccgcctcccagaatcaagagattcttgtgcctcagcctcccaagtagctgggaccacaggcgcctgccgccatgcccggctaatttttgttatttttagtagagacagggttttgccatgttggccatgctggtctcaaactcctgacctcaggtgatctgcctgcctcagcttcccaaattgccaggatcacaggtgtgagccactgtacccggcccatgttcgctttgatattaagacataaagagagaccaggcgaggtggttcatgctggtaatcccagcactttgggaggtcgaggtagaagaatcacttgagcccaggagttggagaccagcctggccaacatagggagaccctgtctgtacaaaaaaataaaaataaaaaattagccagttgtggttgtgtgcacctgtagtctcagctactcagcaagctgaggtaggaggatcccttgagcccaacaatttgaggctacagtgagctatgatcatgccactgcactccaggcgacagggtgagaccgtgtctcaaaaaaagaaaaaaaggtcaggcacagtggctcacgcctataatctgagcactttgggaggctgaggctgacagatcacctgaggtcaggagttcgagaccagcctggccaacatgatgaaacctcgtctctactaagaatacaaaaattagatgagtgtggtggcaggcacccgtaatcccagctcctctggaggctgaggcacgagaattgcttgaatccaggaggcagaggttgcagtgagctgagattgcaccactgtactccaccctgggcgacaagcaaaattccatctaaaataacaataattacggtttttaccattaaatggcaaaaaccggaattacttttgtatcaacctaattatattagtaggttgaacacaacaaaaagttgaaccatatgaaattgccatttttttggtttaaaattgtcagtaccaccaattttgtatggtttaacctaatagtgatgatttattctgccacataactaaaatgaatagagtatgcagccttcaggcacagttgtatccaggtgctcagagacagttgttgggaatgttttctgtggtagctttttcccaggctgctctccaggaggcaagcagatctgggtcacatgccttcaatgaagcagtcagtgtggctttgggtgtagaacacactaattagccagacctgggttatccgcctgccttagggttggagcaggggagccatccacgtgatctgagcggaaagaatgttctttcaaaggaaatcaatgtgctgttgggaagggaggatgggtactggacaggtcaaagagcagacaccagtgaatgacacagaaatgagtggaagtgggccaggtgcagtggcttatgcctgtaatcccagcactttgggaggcccaggtgggtggattgcttgtgcccaggagtttcaaaccagcctggacaacatagcaaaaccctgtctctactgaaaatacaaaaactgaggtgggaggatcagcagagcctggggaggccgaggctgcagtgagctgtgaccgtgccactgcactccagcctgggtgacagagtgacaccctgtctcaaaaaaaaagagaaatggatggaagttaaagtttctgggagtctgaaacttctctccatccccccctcccagaggtgatggtgggtatgggctacacacgggaagaaatcaaagagtccttgaccagccagaagtacaacgaagtgaccgccacctacctcctgctgggcaggaagactgaggtcagggggcgccaggggcccttggggacgcgtgatgcctgggtggagggacttggggtgcagaagagcctcatctgtcatcctctcgcaggagggtggggaccggggcgccccagggctggccctggcacgggtgcgggcgcccagcgacaccaccaacggaacaagttccagcaaaggcaccagccacagcaaagggcagcggagttcctcttccacctaccaccgccagcgcaggcatagcgatttctgtgagtatcaaccccacgccctcacgcaccctccttctccccaaggcccagacttacagttacgtcagggttctctgattggcaagcaacagaaacccactggagctaacctcagagagggaggaatgtcttataaagacacagggcattgcatggaacttggaggcaggaatgcacagccaggctcaggaagggattaaaaccggaaaagcagccagacccagagcagacactctctgtcttgcttcctctctgcttgtgtggtttttcctttgtctctcacttatctcatcctatcttttttcctgatgtcccagctccccgatttttttttttgagatggagtctcactctgtgcctcaggctgtagtgcagtggtgtgatcttggctgatggcaacctctgctgcacaggttcaagcgattcttctgccttaggctcccgagtagctgggattacaggcgcctgccataaccccccggctaatttttgtattttcagtagagatggggtttcaccatgttggccaagctggtcttgaactcctgacctcgtgatccaccctcggcctcccaaagtgctggcattacaggtgtgagccactgtgcccagccttttcttttcttttctttctttttttttttgagacagagtctcactctgtatcccaggctggagtgcagtgtcgtgatcttggctcactgcaacctccacctcttgggttcaagcgattcttgtgcctcagcctcctgagtagccgggattacaggcacctgccaccacacctggctaatttttgtatttttagtagagacagggtttcaccatgttggccaggctgctcttatactcctgacctcatgatccacccacctcagcctcccaaggtactgggattacaggtgtgagccactgcacccagcccccaatttcttaccttagagaccagtccaaatggcagctggaatctctggtccaggatgaagctctgatatcagagtcaagtttgaattaatccattgtaactggggcacaggaggacacgttgtacaaagtggctgctgagagtctgccctctggctttgcctccacactgaagtaaaggaggctctggaagagagctgggcggacagctgattataccccacattctgcaactgacagacatctcatctgctgcagaaaatgaatacagagtctgagtttaaatctgggccaggcacggtggctcatgtctgtaatcccttgggaggccgaggtgagtggatcacctgaggttgggagtttgagaccggcctggccaacatggtgaaaccctgtctctactaaaaacacaaaattagctgggcgtgttggtgcgtgcctataatcccagctactcgggaggctgaagcaggagaattgcttgaaactgggaggcggaggttgcagtgagccgagatcatgccattgcacaccagcctgggcaacagagagacctcatctcaaaaaaattaaaaaaaaaaaaaaaaggatacacaccaccatcagcacccattaggcatggagacttctgagaggtcccttcacccacacactcatcaaattttaaccctctcttctattttttttaacggctttattaaggttaaaatt[137 bp omitted]acatagcaagaccccgtctctacaaaaaaattaaaaattggccaggcacagcggctcacgcctgtaatcccagcactttaggaagccgaggtgggaggatcacgaggtcaggagttcaagaccagcctggccaagatggtgaaaccctgtctctactaaaaatacaaaaaaagccaggcatggtggcgggcacctgtaatcccagctactcgggaggctgaggcagagaattgcttgaacctgggaggtggaggttgcagtgagccgagatcacgccactgcactccagcctgggccacagagcgagactccgccaccccgccccctaaaaaattaaaaattaggtgtggtagtacacgcctgtggtcccagctacttgggaggctgaggtaggaagaccacttgaacccaggagatcgaggtcgtggtgagccgtgatcgcgccactgtactccagcctgggttacagagcgagacctcatctcaaaaaataaattaaaaagtgcacaattcagtggctttaatatatttatagagttgtacatctatcatgatgaccgatttcagaacattttcattaccccaaaaagaaaattcacaacttttagcaatcaacttccaggcagggcatggtggctcatgcccgtaatcctagcactttgggagactgaggcaggcagatcacctgagcgcaggagttcgagaccactgggcaacatggcgaaaccccatctccactataaaatacaaaaattagccgggcgtagtggcaggcgtctgtaatcccagctactcaggagtctgaggcaggagaattgcttgaacctgggaggcggaggttgcagtaagctgagatcgcgccactacactctagcctgggcgataagagtgagacttcctctcaaaaaaaaaaaaaaaaaaaaaaaaaaatcaacttccaatcccccttccaccctcagctactaatctactttctatgtcgatgaatttggctattctagacatttcaggtaaatggaattacacgatgtgtggccttcagtgactggcttctttcatttagcagaaagttttcaaggttcatccatgatatgggtatcagcacttcattccttttcattggcaagtaatattccattgcatagatagaccacattttgtttatccattcatgaacacgtggattgcctccactttttggctgttgtgaatgatgctgctgtgaacatttgtatccgtgtttttgtgtggctgtgttttgccgtcatttctcttgggtacgtatctgggagtggaattgctgagtcatctggtaactgtgtgtttaataatagtttgaggaactttcagggtgttttccaactctgttcgttttacagccctgcttgtctgcaggggtgaagttcttactctgggacaggtactaggctgtctgcttgtctaatcttttttttctctgtcttacatatctcaccttatctttttctagatctctcagctcctagatttcttcttttttttctttttttgagacagagtctcactctgtcgcccaggctggagtacagtggtgcgatggtggctcactgaaacctcagtctcccaggttcaactgattctcctgcctcaggcccccgagctggaattacaagccaccttgcccagctaattttgtatttttagtaga[138 bp omitted]ttttttttggaggcaaagtctcgctccgttgcccaagctggagtgcagtggcgcaatcttggctcactgcaagctccacctcccgggttcatgccattctcctgcctcagcctcccgagtagctgggactataggtgtccaccaccacgcccagctaattttttgtatttttagtagagatggggtttcactgtgttagccaggatggtcttgatcgcctgacctcatgatccacctgctttggctttggcttcccaaagtgctgggattacaggcatgagccaccgcgcctggcccgctcctagatttcttacatctcagttttagaatccagcccagggctgagtgcagtggcttacgcctgtaatcccagcactttgggaggctgaattgggtggatcacttgagctctcaagttcgacaccagcctgggcaacatgatgaaacctcatctctacagaaaaatacaaaaattaggctgggcgcagtggctcttgccttgtaatcccagcactttgggaggccgagctgggtggatcacctgaggtcagcagtttgagagcagcctggccaacatggtgaaaccctgtctctactaaaaatatcaaaattagccgggtgtggtggtgagcacctgtaatctcagctacttgggaggctgaggcaggagaattgctggaacccgggaggcagaggttgcagtgagccgagattgtgccattgcacttcagcctgggcggcaacagcaagactctgtctcaaaaacaaaacaaaacaattagctgggcatggtggtgtgcacctgtaatcccagctacttgagaggctgaggtgggaggatggtttgagcctgggaggccgaggttgcaatgagtccagatcgtgccactgcactccagcctgggcgatagagccagactgccgtgtctcaaaaaaaaaaaaaaaaaaaaaaaagaatccagcccaagtgttagctagaatctccttggtccactcatcaggatcaggatggagctctgatatcgagtccagttgggattaatctgctgtaatgggggcacaggaggacacattgcacaaagtggctgctgaaagcctgcgctctgacctcccctccacactgaagtgagggaggagagaggtgtcagggaatctgagacccagcatgagccccacacgggaagtggtgcttctgccctacccccaccattgctggaggtcaaaccattccctgcccctgcgtcttgtctttcccacctgtaaaatgacagggcgtgcccagaaagttcctaaggagcttgtgactttggtatcatatggttagaacgtggtaaccttcagaactccccacactgagacctgagttccagggattctcagagagggattgctggcaggtgccaggtatctgtcattgtcattgtagagctctcagcttgtggttctgggacttctgagcatgtatcgctcctgaggatgtaacaagcagaccttctgaccctctcaagtttgagatcacttttcacccccgggttctaaaacagtagattcctaagatgttcctagagaccagaattattttgtgttgcttttgaaattgttcatacaataacatccttgaaaatgtgttagtttggaaaggatagacagtgaaaaagtcttcatccaacacatatccccagctcccagtttctcaaatgcagcaactgttacggttttttgttgttgtttttgttttgttttttgacggagtctcgcactgttgccagactggagtgcaatggtgtgatctctgctcactgcaacctctgcctcccaggttcaagcgattctcctgcctcagccttccaagtagctgggattacaggtgcatgccaccatgcccagctaatttttgtatttttagtagagacagggttttgcca[269 bp omitted]atggcgaaatcctgtctctacaaaaaaaaatacaaaaattaggtgggcatggtagtgtgtgcctgtagtcccagctacttgggaggctgaagtgggaggatggcttgagcctaggaggccaaggttgcagcaagctgaggtcacaccactgtacttcagcttgggcaacagagtgagatcctgtctcaataaaaaaattaaaaaaaagaaggaaacttaagatatataaaaacaataaattctccccttttgaaacaagttatagtcctttggagatattcatatataagcaagtagatatagatacacacttttttgcttttgtagacaaatgataacacattgttgacccatctcttgtcttgccttttctactttccagtccgtcatgaagatcattctgtactggtgcataaagtgcttccttattcttttttatagctgcataattttccactgtggaaataccttgacttatctagtcattcctctactaaggggcatttaggctgttcccagtctaatggtacaggccaggtggggtggcacacacctgtaattccagctacttgggaggctgaggcaggagaattgcttgaacccaggaggtggaggttgcagtgagcggagatcgcaccactgcactccagcctggcaacagaaccagactttgtctcaaaaaaaaaaaaaaaaaaaagaaggtgcaatgaatggcctgtatgtgcatgatgtcattgatttggagtttctaagtcagtatatgtgcgttggtaatcttgaggtaattttgacagatattgtcagaatggcccacacagagattgcaacccacgtgaggaattctcaggttccaacgatcccccagagtcagttctgggtttccgtggtgatgccagctctaaacggtaccccctcccccaggtggcccatcccctgcacccctgcaccccaaacgcagcccgacgagcacgggggaggcggagctgaaggaggagcggctgccaggccggaaggcgagctgcagcaccgcggggagtgggagtcgagggctgcccccctccagccccatggtcagcagcgcccacaaccccaacaaggcagagatcccagagcggcggaaggacagcacgagcacccccgtgagtgaccagggctggggggcagggctgggggcgccacctgggccacattcctcaggccctgccttcatctcattccccagacggaactccttcttaccaactccttcttctacccattcattcattcaacaaacatttatcgagtgcctctgtttgcctgagctcagtttatacactaacatttgatgttagcgtataaattagtgttctgtgtcaaagaagtgcagaacgtactcttggcagaaaggatttaatacaggaaattaagtgcttttaaaaatgtgggaaaggccaggcacagtggctcatgcttgtaatcctggcattttgggaggccgaggcgggaggatcacttgaggccaggagttcaagaagcatagcagacgccatctcaactaaaaatcaaaaaaattagccaggcatcatgttatgtacctgtggtcccagctactcgaaagaccgaggtgggagaatcacttgagcccaggaggttgaggctacagggagctgtgttcccgccactgcactccattctgggtgacagagcaaaaccctgtctcaataaatcaataaataaaatattaatagtaatttaaaaaatcaggccaggcacagtggcttacgcttgtaatcccagcactttgggaggcagaggtgggcggatcacttgaggtcaggaatttgagacctgcctggccaatatggtgaaaccccgtctctactaaaaatataaaaatcagctgggcgtggtggcgggcacctataatcccaactacttgggaggctgaggcaggagaatcgcttgaacccaggaggcggaagctacagtgagctaagattgcgctactgcactccaggataggtgacagagtgagactccatttcaaaaaaaaaaaaaaaaagccaggtgcaatggctcatgcctgtaatcccagcactttgggaggccaaggcgggcagatcatgaggtcaggagatcgagaccgtcgtggctaacacagtgaaacctcaattctactaaaaatacaaaaaattagctgggcatggtggcatgcacctgtagtcccagctactctggagggtgaggcaggagaatcgcttgaacccgggaggcagaagttgcagtgagccaagatcataccactgcactccagtctgggtgacagagcaagactctgtctcaaaaaaaaaaaaaaaaaagtcgtgggaagcagcagcagcttccccagctcctcagctcttccggcatctacattcggtcccactccctgctcttctgctctgcacatgttcagtagccgccccacgtggctgtgcccttggcctttcgaggctggtcacggcaggttactaccagtcaagtcccagccttgaccagggtgcacacaggtgtgagtctgagccaattgtgggcctaaacttttaaaagtatgggtcacctgccaggcgcggtggctcacgcctataatcccagcactttgggagtccgaggagggtggatcatgaggtcaagagatcgagaccacctggccaacatggtgaaaccccatctatactaaaaatacaaaaattagctggctgtggtggcgcatgcctgtagtcccagctactcaggaggctgaggcaggagaattgcttgaacccaggaggcagaggttgcagtgagccgagatcgtgccactgcactccagcctggtgacagagcaagactctgtttcaaaaaaaaaaaaaaaaaaaaaaagcatgggtcaccacccacacagacacaaaatacttatagttatcctttaccataagattttgctctttaacaaataagttggctgggcacggtggctcatgcctataatctcagcactttgggaggcccaaggtgggcggatcatgaggtcgggagttcgagaccagcctggccaccatggtgaaaccccatttctactaaaaatacaaaacttagccaggcgtggtggtgcacgcctgtaatcccagctactcaggaggctgaggc[131 bp omitted]aagtttttagtcagacatggtggctcacgcctgtaattccagcactttgcaaggctgaggtgggtggattgcttgagctcaggagttcgagaccaacctgtgcaaaatggtgagaccccttccctacaaaaaatagaaaaattagtccggtgtggtggtggcacgtgctggtagtcccagctacttgggaggctgagggaggaggatcacttgagtccaggaggcggaggttgcagtgagccaagatcgtgccactgcactccagcctgggagtctccagagggagaccttgtctcaaagaaacaaacaaaaaagtttttaaatactaatttttctcgtacgttcttgagaacattcatctttttaacttcttcttagtgctcttggtgcccctgggtacttccagtttattttggttctaaacacccaaggcaaaccaaggtctcactgcatggctgtttgcgaggtaggggtgtttctccagaggtcctgaccatcaggaggcacccagccgtggtggctggtggtgtctggctgttaccagcattcaccagccttgaccggctttgactgattgtgactggccttcactggcagtgcctgacagggccccactgaagctttgaccacaagtgtccacctgttaccagtggcagccagctgtggccagcattaaccagcctttactggcagtgtccagccatgaccagtattaaccagcagcaactgactgtgaccggctttgaccagccttgactggccgtgacaacccttggccaacggtatctggctgtgaccagtggtgtctggctattaccacttatgaccagctttaactgtccctgactgttggtgactggccatgaccagccttaactggctgtgacaggctttgaccagcagtgtctggccatgaccagcagtagccagcagcaactggcaatgaccggctgtgtttggtttggctagctgtgaccctgccaccacctgtgaggactgctagtccaggttcagggccctggactccagggctgtgcagagcccggggtcagtacagggaggggagtggaatgttgtgagggaaccccgtggggatgggccaggagagggtgcacctgaggacagctcactggctacctaacagcagaagggccttggggaaacagatcttgaaggcatcagctcaacttcaggcaggtggcacaggagggaggccgggatgcctgtgtgtcctgagtattccggataagtacaaattcatgccccttggctcttccccagccccgagacctggagcttcacaatgcagcctctgaggcccgtgtgtcagagaatgatccacaacccagagaatggatgggagcggcagggccaaagaaggagaggatgaggtggttaaagaaaaaagaaaacaaaattgtaggaaggactggaggagcggacaatgggtgggatttgtaggaacaacagtcacaaccacaccacagaactgacccaccaagggagctgctccttctgaggctgccccagcactggtgaattcaagagtgcattgttaggccaggcatggtggctcatgcctgtaagcccaacagtttgggaggccgaggcggtgaatcacttgaggtcaggagttcaagaccaacctggccaacatggcaaaatcccatctgtacaaaaaatacaaaaattagggccagg[138 bp omitted]gtggcgggcacctgtagtcccagctactcgggaggctgaggcaggagaatggcatgaacctaggaggcggaggttgcagtgagctgagattgccctactgcactccagcctgggtgacagggtgggactctgtctcaaaacaaaacaaaacaaaaaaccacattgtcatggctgtaacccaagactcaaaaacttcatcctccatcagaagagcttcttgatgcccagagggctggacaataggcactggggccctgctgaagcaaagaccttcatctcatagccttgcctgtgtgagctgaagtcaaagcaggcaggagagcagctgctgccccatttccaccttccaaatcttcatgaatgcaaagattggcagaacccaacttatatgcagaacctgagctgcaaaggattctgggaaatgtaggacttggcttttttgcatctgagttcccaagaacagcaaagtacgaaaatatcctcaacataggaacaggagagtggaggcagagctggacatggtggcacacacatgtagtcccagctacttgggaggctgaggtgggaggattgcttgaggccaggagttcgagaccagcctgggcaacatggtgagatcctatctcttaaaaaagagaaaaagggtggaggcagtttgagaaagtggccgggactctgaagccacgtagagtttgaattacattaatgagccgtgtgaccttgggcaagtaacttcacctctctgatctttgatatctcactatgtgaaatgggctcattaaagaacctgggtcattgtgaggatcttgtaagatctcatacgtgaagtacttcacatactggcacagtaagcactcagtgaatgagagctattgttattgctaaacgaaacccacaccttaagaaggtaaaaaaggaaaagcaaataaacctcaaagaaagtagaagggaccggaattggtggctcatgcctgtaatcccagcagttcgggaggctgaggcaggaggattgcttgagcccaggagttcaagaccagcctggacaacatagaccctgtctctgccaaaaataaaaattagctaagtgttgtggcacatgcctgaggttctagctacttgggaggctgaggtgaaaggatccacttgaggccaggaggtcgaggctgcagtgagccatgatcaccccactgcactccagcctaggcatcagaacaagaccccatctcaaaaaaagtagaagggaggaggcattaaagagaataaatcagtgaaggagaaagaagaggtacaataaagcaacaaaacctaaagttggttttttgaaaagattaataaaatcagtctgggcgtggtggctcatgcctgtaatcccagcactttgggaggctgaggcgggtggatcacttgaggtcaggagtttgagaccagcctggccagcatggtgaaaccccatctctaccaaaaatacaaaaaattagctggatgtggtggtccacacctgtaatcccagctactcgggagactaaggcaggttcacttgaatctgggaggtggaggttgcagtgagctgagatcatgccattgcactccagcctgggcaaaatgagtgaaactctgtccaaaaaaataaataaataaataaaatccaatggacccctggtaaaaatcaattaaggaaaaaagacagcaaacatgaatcaccagtatccacaatgaaaaggggaactttgttctaacattaaaagatagtaagatgatattaggaactactttgtgccaataaatttaacagcttagatgaaatggacacattactttaaaaacacactgtatcaaaactgacacaagaagaaatagaaaacctgaacagtcttatattcttgttaaagaaattgaattcgtaactgaaaaccttccctataaagaaaatttttggcttggatgactcccaccagtggaattcttccaaacacttaaagaagaaataacactaaccttagacaaacttccagagaatagaaaaagagggctctcttcctaacatgtttatgaggcagcataatcctgatattccctgtgttcccagagctcacagcccagtatgggatggggacatatatgagaacagacattgacagcacagtgattgaagctgcagtggggagcccaggggcctgtgggaacccaaaggaggaggcacgtgactcagcctggggccgggggtggtggtagattatgaactgacacctgaaagatatgtaggagtgagtcaggggaaaaggtaggagtaatgttctaacaggtgagacagccagtgcacaggctagtcacagtgacagaatgtggcatgaataagtacattagcaaacgtttggtgtggctgggctggacctcaagaaggtgggcattgctgggagaagagcggtggacaaggatgccccctggaaaccttccctgcctcgttttccctcagtgcccccctcttctccggtctccaggggtctcccctgactcagcctcggtggctgggattactcatgaacctttcacatctttgggacctttcaccatctcctactcaccctgggttcccacatgagcccctgacttattcatcgatggggagggcagagaagggaagagggagaagctcaggggcatgtcttcaccccctcactcccttcctggctgtgtctcctgcagaacaacctccctcctagcatgatgacccgcagaaacacctacgtttgcacagaacgcccgggggctgagcgcccgtcactgttgccaaatgggaaagaaaacaggtacggagggggcagcaacagggtgaggggtgggaagtagggggtaggtgaacaggacctcccttgatctgagatgataggcattggaggctggtgccatggggaccagagagtgagtgtatctgccctgcccttggcagaatcgacccatgtacccccctgaaaatcctccccacttaattaattagtcttaagcaccaggaaagcagttggccctgttctccgcctacaagccttgggaacctgaattgattttttgaatgatccatttttagaactcgagagaagccccagaatgtcacagcttcagcgtcatctggttggctggttttccggcttgttggcctgagtctgtgaggtctcttccagctggcaagggagggaaaccagttcagactggctggagcagagagagggaagggattggttcacatcacaggtcaaggccagctagaatggggccagctccaggatgaggacactgccccccaccagggctgtagggcaggttgatggccaacaccagggcacactctgggatgcacctgattagtgggtgcaggtgttcccactgggtgtgggcagaggaatggggtagttaacagtcacaaatctgtccaggcacagtggctcatgcctgtaataccagcactttgggaggctgaggcaggtggatcaagaagtcaggagatcgagaccatcctggctaacatggtgacaccccgtctctactaaaaataccaaaaaaaaaaaaaaattagctgggtgcagtggtgggcacctgtagtcccagctactctggaggcagaggcaggacaatggcgtgaacctggaaggcggagtttgcagtgagccgagatcacgccactgcactccagcctgggcaacagagcgagactccatctcaaaaaaaaaaagtcacgattctgtgaatactcagttctgagttcgaatcttacctctgtgctcacactgctagcagaatgaccgggtaaatccctgtgcctctgtttcctcctcggtaaaatgggcttgatgctggccgggcatggtggctcacacctgtaatcccagcactttgtgaggccgaggtgggcagatcacctgaggtcaggagttcgagaccagcctggccaacatgatgaaaccctgtctctactaaaaatacaaaaattagccaggaacgatgtcatgtgcatgtaatcccagctactcagaaggctgaatgaggcaggagaatcgcttgaacctgggaggcagaggttgcagtgagctgggattgcgccactgtactccagcctgagccacacagcaagaatccgtctcataaaaaaaagggctgatgctgtccacttccaggccccattatagagatgcagtagagatcaggtgtgtcctgtacctggcactgggtctgatgcttaggaggccttcattcagtgacttgagagtgcttttttttggtggttatcaaataacaatagtgaacattcatgaagcagcagctacatgccaggcttctatgtctattgcctggctcagtgcccctaacaactctgtgaggtagatcctaatatctccattttacagctgaggacataaggcacagagaggttaagtaacttatccaaggccacacagctggtaagtcaagaagcagattccagacttgactccagaatcttatttgtaatcactgtagtacatggccttccagttctgctcaagagatagtggaacagttaaattacagactcagacaaaaaaaatcaaaaattaaaaaaaaatttaaaaacaacaaaaaataaaaagtatagactcagctagctgctgtaataaaaacaaagagatcccagggtagagtaatttaaataaaaaggacgtttagtccggagggtcctccaaggacccaggtaagttcttccagccccaaaatgagtttccagctctgggactgaggccgctgcaccagcagccatcatttcccaatcaggaagaagtggggaaagagtaggggacaagcaacaactctttgtaaaggcgtcacccagagatggtacagagcacttctgcttatatcccattggccggagcatggtcacataaccatctctagctgcaagagagtctgggaaatgtagtctctggctgggtggccatgtgcagtgctcatactcttaggggtttggttaccaagaacgaaacagggaggatggattctaagggagaagtaacagcctctgccacaatcaggattcttctctgagatccaggctgggcctggagtccctgggaggatagaaattggaggtctgggctgggcgcagtggctcacacctggaatcccagcactttgggaggccaaggccagtggatcacctgaggtgaggagtttgagaccagcctggccaacatggtgaaaccccatctctcctgaaaatacataaactacccaggcgtggtgctgcatgcctatagtcccagctactcaggaggctgaggcaggagaatcacttgaacccaggaggcagag[133 bp omitted]gaggcaggagaattgaactcaggagatggaggtctggcccctgctgtcgactaggagggtccgaggggctggaggagggtcctgggacagtggaacccccactgcccagattaccatagtgaatacaggtatccttgacctttacatctatccctttcctgattttagatggtgagagttcagatagcaaagtgtttgccaagttgatttggttcctgaggtttcggcaaatagcaaggaagtcacccaaaaatgtctgtgcatctattcagttgctgcgtttagagagaggagagttgtgataggagatgatttggagcgggtagagtttgaagaagggacagtttgaaggaggggtaataggagaggagagagtcagtaaaataatgctaggattgtatagtgcacagcctgcacaactgtacgttgcagccctgtctctgagttccaggctggttgcagtccctggtctcaggacaggaatgtgaagaatcaaagggactggggccctggcctgcctcagtcccccaccctgacttgtctgtctctgcccacagctcaggcaccccacgggtgccccctgcctccccctccagtcacagcctggcacccccatcaggggagcggagccgcctggcacgtggttccaccatccgcagcaccttccatggtggccaggtccgggaccggcgggcagggggtgggggtggtgggggtgtgcagaatgggccccctgcctctcccacactggcccatgaggctgcacccctgcccgccgggcggccccgccccaccaccaacctcttcaccaagctgacctccaaactgacccgaaggtgagctccgcggggatggcaggggcagggcggggcggggggccgatgggacctaacctgtcttccactctgctctgtctcctgtaccccaacatttcctcttcctcctcctcctcctcctcgtttcctcctcctcctcctcctttcctcctcccctgtcacccctcacctccctcctcacactgcagggttaccctcgatccctctaaacggcagaactctaaccgctgtgtttcgggcgcctctctgccccagggatccaagatcagtaagtcccgtccatgccctgttctcgctggctctgcctccctgcctgcatgtctgacctgtgtgtgcgggcattgggagggggctctgtggatgtgagggtctgtgcgtggggtctggttgttcatttactcacagaagcacagcctatggagccagactcgggggttcaaatggcagctctgccaagtgaccttgagcaagtcactcaaggtctctgggcctggttttcctcttctgtaaaatgggtatagtaataacaatacctgtctcctagggttattgtgaggactaaatgaagtgacgtatggactgagcgtagaacattgccttggaaagtgctttacatgtgtattagttattaattgctattattcattgagcccctactgtgtgcctggcactgtcctaggccctgtagtagagggtgagcaaaatgtacaaaactcctgccctggcagacccaacattctactaagggatctagacaaaaaacaaagaaataagtaaaatatacttactatatagactgctaggtagtgcgaagtaactaagaagaaaaatagagtaggagccaaatttggtggcttatgcttgtaatcacagcactttgggaggctgaggcgaggggatcacttgagcccagaagttcaagaccagcctggacaacgtagcaagatcctatctctacaaaaaagtaaataaattggccgggcgtggtgactgcacctgtattcccatggaattgggaggccgaggcaggaggatcacttgaacgcaggaggtcaaggctgctgtgagctatgatcatcagtcttggcaacagagggagaacctgtctctaaaaaaaaaaaaaaaaaaaaaaaaaattgaacagggaggggaataaggggtgtggggaagggatggggtgcagcattaaatgggcaggcctctggatgaggtggctcaggccagcaatcccagcactttggacagatgacttgagtccaggagtttgagaccagcctgggcaatgtggcaaagccccatctctacaaaacaaaacaaaaaacaaaaagcagatgtggcacgcgcctgtagtcccagctacttcaggggccaaggcaggaagattgcttgagcctgggaggttgaggctgcagcgagctgagatcacgccactcctgcatgacagagtgagactctgtctcaaaaaaagaaaaaagggcaggcctcacgaaggaggtgttgtttgagcaaagcatgaatgtatatgtgagcgagggagtgtgtgtgtgtgcacacgtgcgtgtgtctctctctttctctctgtggccacttatctatgtaagggtgtgtctctgcccactcccctccctttcatcttccacattcttcagtatctttcctgtgacctgcactaaccatttcagaatgagccccgttatggggatggacaaggagatcaaatcctgactccaggccctcaccagcccggagggactggggttgaggcaggggctgcttggagtcccagaggcagtgggttgcgggaggtgggttccctatgtccagattagacactctgtccccctcccctcccctagggtcgcagacgaacctgagagaatcgggggacctgaggtcacaaggtgagtgcttgggcctacccctgactgccacttcccctctcctgcctcagcacctcccgacacttaccccagggcattagatggggccccagtctcatcctgcaaggccaacttcctgaaatgccctgtggccccagccttctctgccagctcctctcattcccacccaaccccaagcaccttcccttgatcatcttaaacttcagcctccggctgggtgccatggcccaagcctgtaatcccagcactttgggagtccaagggaggcagatcacctgaggtcgggagtttgagaccagcctaagatggagaaaccccgtcgttactaaaaatacaaaaattagccgggcgtagtggcgcatgcctgtaatcccaactactcgggaggctgaggcaggagaatcgcttgaacccgggaggcagaggttgcggtgagctggattgtgccatcgcactccagcctgggtagcaagagtgaaactccgtctgaaaaaaaaaaaaaaaaaaaaaaaaaagcctcatcccatccacaactcaactcctcttctggtcaatgcccccacctccttttgcctctcatccagtcatggcacaatgtttgctggcagctcagggccagcaggaggcaaacatctgtacggacccagatcatgaagattttaggctttgagggccaggcaccctgtgtcacgcctgttcagttgtgccattgtagtgcaaaagcagtcatattcaacacaaaacaaatgggtatggcagtgttccaatgaaactttatttacaaaagcagacagcactggagtttgccaagccctggttttgtctgagttcccggtttagagacccaagtggaaaccggagccttcccagcagctgcaacaaactgccagggctgactctcattggttgggacttggtcacatgctcattcctaaaccaatgcctgcagccagagaggagaagtactctggttggtcagacctggtcatgtggtcacccttgacccaagcacagtggccgggaagtagaatgctatcattggcagagctgagtcgtgctcacccaagctgaggggcggccccaccggaacaagggaggctagtcctgggatgctcatgtagagcagcactctcgtacttcaggcgggacgtttctttgttgtgcagggccctcttgcacattggagaatgtttttcattcctgacctaccccatccccaacctagtcagtgccagcagtgctcccatcctaagacatgtgacaatcaaaaagcccccagaggccgagcacagtggcttatgcctgtaattccaacaactcaggaggccaaggcaggaggatcacttgagcccaggaggtcgaggctgcagtgagctgtgattgcactactgcattgcaagaccctgtctcaaaaaaactaagaagtggccgggcactgtggctctcgcctgtaatcccagcactttgggaggccaaggcaggtggatcacctgaggccgggagtttaagacctgcctgcccaacatggtgagactccgtctctactaaaaatacaaaaattagctggccgtggtgcctgttctcccagctacttgggaagctgaggcaggagaattgcttgaacccgggaagcagaggttgc[132 bp omitted]gcgggcagatcacaaggtcaggagatcgagaccatcctggctgacacggtgaaaccgtgtctctactaaaaatacaaaaattagctggggccaggcgtggtggcgcgtgcctgtaatcccaactactcaggaggctatggcaggagaatcgcttcaacccaggaggcggaggttgtggtgagccgagatcgttccattgcactccagcctgggtaacaagagcaaaactccgtctcaaaaaaaaaaaaaaaaagaaaaggaaaaagaaatttctcattcaaacattcaaaccatgtggccaagccaggctggtaaggccactgtgatctatgcggtcattcaggtccccaggttattgcatcccgattccctggagcccttgtcatcttcacagttgaggctggcctgtgccactgctaagtccagctcctgggagatgtgggacaggagagcctggcacatgcaggttctttgaaggaactgatgtggatggcacatctcacttctgctcatgtcccagaatttacagacaaggtcacacctggttgcaagggaggctggaaagtgtggtctctagctgggcagctctgtatccagttgaaactgtcgctggggtaacaggggaagatgttttttgaggggatggctaggaatgtgtcccgaattgggaagagttgtcccttcagccctccaccacattcctcttcgctcccatctctgacccctgacatcttctcgcctcagttgccatctaccttgggatcaaacggaaaccgccccccggctgctccgattcccctggagtgtgaagctgaccagctcgcgccctcctgaggccctgatggcagctctgcgccaggccacagcagccgcccgctgccgctgccgccagccacagccgttcctgctggcctgcctgcacgggggtgcgggcgggcccgagcccctgtcccacttcgaagtggaggtctgccagctgccccggccaggcttgcggggagttctcttccgccgtgtggcgggcaccgccctggccttccgcaccctcgtcacccgcatctccaacgacctcgagctctgagccaccacggtcccagggcccttactcttcctctcccttgtcgccttcacttctacaggaggggaaggggccagggaggggattctccctttatcatcacctcagtttccctgaattatatttgggggcaaagattgtcccctctgctgttctctggggccgctcagcacagaagaaggatgagggggctcagcggggggagctggcaccttcctggagcctccagccagtcctgtcctccctcgccctaccaagagggcacctgaggagactttggggacagggcaggggcagggagggaaactgaggaaatcttccattcctcccaacagctcaaaattaggccttgggcaggggcagggagagctgctgagcctaaagactggagaatctgggggactgggagtgggggtcagagaggcagattccttcccctcccgtcccctcacgctcaaacccccacttcctgccccaggctggcgcggggcactttgtacaaatccttgtaaataccccacaccctcccctctgcaaaggtctcttgaggagctgccgctgtcacctacggtttttaagttattacaccccgaccctcctcctgtcagccccctcacctgcagcctgttgcccaataaatttaagagagtccccccctccccaatgctgaccctaggattttccttccctgccctcacctgcaaatgagttaaagaagaggcgtgggaatccaggcagtggtttttcctttcggagcctcggttttctcatctgcagaatgggagcggtgggggtgggaaggtaaggatggtcgtggaagaaggcaggatggaactcggcctcatccccgaggccccagttcctatatcgggccccccattcatccactcacactcccagccaccatgttacactggactctaagccacttcttactccagtagtaaatttattcaataaacaatcattgacccatgcctactccatgccaggcccagtgctggacacagagacatgaagctctgtctgtgggagacagggattctgacacagacaccggacaaaccattgtcttggggagcccagaagagaaagtgggcagggtggggtcattggggaagatgctctagaggaattaatgctggaatggggtgttgaaggatgagtaggagttagttaggcattgagtttgccctgggcaaaagcccagaagtgggagtatgtggtatatcttcagagaactgggtaatttcagtgtggctgctgtgttgggcatggatggagaatcagcaagagaaatgctgtattaggactaataatccatctacgctgcttaagcaaaaaggtatttgttggtttatgttacttaatagtccaggggcacctggcttcaggtaggtttgatccaggcatcaggccattgcatctattttttcagtgtaagttgaattctagtaatttttatcaagtaagggctcctttcctggtggcacagatgacttcagcagttagaagtttctatccctccagctttctgcagcagaaagaccctcattgtcagtttcccagcaaaagtcccagggcagactctcattggcccaaatgggccatgtgattttctctaaaccaatcactgtgactctagagtggccagactcagagctgcacttagtaggggttcctcaaaggaaggtcaagtgtcatgagcaggagaaaaggcatgggagctggacagattatagtggttgaagtctgtgcagtacagaagggcggagcttattcacacagcacctttggggccaaaatgaataagctggactttctccccatggcactggggaaccatggaagttcagggaacttcagggaagaggcttggtcaattcctgagagcatcctctgtgctggggacacagtggtaatcaagacagccccaacactgccctcatagagctcacagtccaatggaggaggcagatgtgtcctcaggcagcgactgggcagggctggtataggggagtccagaggtgatgcctgcctcagccagggagggcttcctggaggagaaggagccagctagacatggataggagtgcgttttaggcacagcaaatggcacatacaagggccagggagcaagagagaggacaggtcctcaacaaatggcatgtgactttgtaagtgtagaattgctgtgaggtatggggctaggggcgtcagtagggccttgaaggttatggacaggggcctgggctttcttccaagggcactgggggagccatggcaaggttgtaggtagggtagagatgggcgggtttgtgctatgtgcagggtggaagggagggaagttgacaggtcagaagatcaggaaagaggtcggggctggacagatggggagagcgcagatagatttaagagagtcctgtgaggcaaagtgggcaggacctggtaacaggtgtctggactgtggctttggctggctcagaaggtccccactggcgtgtgtggtctatgtagcctctgggtgtggagctgggatcttcaactggggacagtacagtaaagaacatcacagcatctcacaggttctgcataccttaatgtttagaatctctcctaaccttccttgtagtaatctccctgggaacttttggggacatccctaggcctcaatttcccctctgtaaaacagagggcagattgaactacaagggcccttaatctctgtgactcttgaggtttgaaaaagcaccttaggttcctgagggctttgtcggttcttccatttactcccacctcacttttttttttccctaaaacgtttgtcttttggggcccaccgactgtgtccttgttaacgtagacattggcctgtttgactgggtggaggtgattgacgtgcccaacacccaatgcatgttcagctactgcttgacttctattaactcttctccctccaccaattgctctaccacacctctttcctgttccttcctgggactgagttctccaaaaggcctatccctaaagacttcatggggatgctcagactcacagattggagagggaaacagcttggtcaaagacattgaggtgggaattggagggtgtcaggtgtgaaagaatcagaggagtaatggggaaagaactggaaaggtgagcctccagcaaatggtatgcatttcagtgtggccttgagttgcaaaataacagaaaagctttctaggagaaatggggagccatggcaggttcttgagaaagtaagggactggcagcagctacagagggatgaagtcagacgggacagaaggaggccactgagaagcagaatataggtagatgtgacgagctgcatgggaggtctcaaaactggagaccgttgggctaaattcaagtttcagacatttcgtttggctgcattcctccccagcgtggacctcgtgtttgagatctgagcatgactaattcaaagccatagttggaaagggcccatgctttgggtgagtgacactgggctcagtgtctctctgggtctcagattccccatagagccttctaatttttggactagattctgtgacctaactttgcctcattttagacccgggataagacatgtttagtacatgcctagacaggacaaaccactctgagaccacacagtggccaattgcacgtcctccctcaataactatcgcacaaagctaaggccaccaatgcttttatttatcgctttgcgtggagacaaagcacaagctccgagtgtgctgggagctctccattaactagagctcctggttggggtggagctctgggaaaagaagaggaccctgccagggagatatttcattggccagaatccagaggatggagcccattggttggaactctggttgaaactggaactctgagaagggtggagagagcccccaggtgggactctgggacagggggcggggcgaggagtgagggagcaggactctggtgggccaggccctcccactggctgggttccagcagtcggtggcaggtgggcaggcgcctacttctgggcggggatcatgtcgtcaatggactggcctttctccaacttcttctccatttccaccatgagcttcacaccatccaccaccagctgcacctgttctacttcggacgagcccagccgatcagcgttggacacgtcaaatactgagcccacggcagctgtgtccacgccacctgtgggagcaagggacaggggcgtgaagaggcagcgaaggtgcagaggggctgggacgtggcccccgtgccaaatgcaacagccgcatgtagtgagtgcctactgtgtaacaggttacctgcacacaggtaatgcctgttcattcgtgagctcacgagtctctgacttcagatggggtaccacgccactcagttatcaaacatagtatagtgggtaagagagtgggttctggagccaggcggcctagggtcgaatcctgaccactcctcgctttataaatggggaaactgaggccccgagggaggtccaagggcatgtgcaatgcatattatataatcatgaaaatcccacattgactcctatcacataggcatattgacacccattttacagaggaagaaatgcaagctcacagagggtcagcccttgccggatccccagaactcgcagggatgtcgcacctctccttgcatccctgcaaagggccctcgctccccctccgtcgtggtgcaaaggatgtgggagccgtacctgtacccctcttctgcagacgcaggcgggtgaggatctcctcgaacttggggtgcttgctcaggtgcgccagcttcacatgcacgcctccacgcagcccagtgcccaggttggatgggcaggtgagcacgtagcccaggtgctggttccacatgaaggggtggccagctttcttaaagatctcctcaatctgaggttcagagagaggaccaggggtcagcgccggcaggcacccccaaatgcacccgcaacatggacagggtccggagggacagggcgtgggaacgtggtggaggtgggattctgaggggaacagggaggtaggagattccgagggtgctggctagacaatggggaccaaggcaggattttgaggggcggggactaagaacgctttgaaggcgggttttttttttttttttttccagagtctctctgtgtcacccaggctggagtgcaatggcgtgatctcgtctcactgcaacctctgcctcccaggttcaagcgattctcctgcctcagcctcccgagtagctgggactacaggcgcgcgccactacgcctggataatttatttatttattaattttttagtatagagac[139 bp omitted]gctgggtccaggggcggggccctgaaaagcgggtggggctagttttggggggcggggtttggcatggggtggagccaggtccggggggcagggccctggaaaatgggtggggcagggcttagtataggggaaggggcggggcctcggaaagcaggtggggcgttcaaggtggagtcagaagtcagcagctaagggcagacacccaccttctgcagccctacgcagaagcggcggaaaacctccttcatgttgccccccttctccatggagatgacccggaggtgatcctcctcgttcacccacaccaggaagctcttgttgtcattgtgcctagagtaaggtgccgcagcaagaggccaaggtgtcagccccgtgggaaccccattcccagccctcccccaaaacatctgcccaccgatgggggaagagggcctgaggggtgggaggtgggtggcatctgcctcctcaaaacgcagaagcttaaacctgtagactctaatgtcacaggatctgcaaaacgctgaatcctgggatcaaggacttttagggacttaagtctttgaacagtattattatagatccttgggatctcaggatgtttgacaaacagaagcttgggatcagaactgataacacttggtaatcctacatctggtttcaggaccagaaaatcttcccatcgtagtgtgttagctccc[151 bp omitted]cctgtctctactaaaaaatacaaaaaaaaatctgggcatggtggcgggcatctgtagtcccagctactcaggaggctgaggcaagagaatggcgagaacccgggaggtggagcttgcagtgagtcgagatcgcgccactgcactccagcctgggcaacagagcgagactccatctcaaaaaaaaaaaaaaaaaagaacataaaatattaagatccggaaatggccgggtgtggtggctcatgcctgtaatcccagcactttgggaggccaaggccggaggattgcttgagcccaggagttcaagactaccctgggcaacatggcaagacccacatatctacaaaatttaaaaaattagcaggcatggtgggacacatgcctgtagtccaagccactggggaggctgaggcgggaggatcacttgaccttggaaggtccaggctgcagcgagctatgatcccaccactgcactccagcctgggcaacagagcaagaccctgtctcaaaaaaaaaaaaaaaaaaacctgagggcaggcatggtggctcacgcttgtaatcccagcactttgggaggctgaggtgggcggatcacttaaggtgaagagttcgagaccagcctgagcaacatggcagaacgctgtctctaccaaaaatacgaaaactagctgggcacagtggcacatgcctgtcgtcctagctactaaggaggcggagggtgagaggatcgtttgaacccgggagatggaggtttcagtgagtcgagatcaacccactgcactccagcctgggcctcagagtgagagtccatctcaaaataaataaataaataaatgagtggaatcttaaaacctaaaaatatttaaaatcttgaaatcttagaatcatcccatctgtatatcttagcacccaggctcccttcatcgattgaaacctaggttctctaaatctttgactatctgaatcagggattcaaagagtcaaaacaagtctagcaataatactttataataaagat[134 bp omitted]agctccgcctcccgggttcacgccattctcctgcctc[224 bp omitted]tcctcacaagaacaccagaaactacaaattattgtgatccctatcctatagctaggaaactggggtagagaaaaataaaataagttgcccaaggtcacaaagctagtaaagttagtaaatggtagagctgggatttgaacctagggagtacggttcaagtctgagttcttatttttgagacaggtagctggagtgcagtacctcggtcatgattcacagtaacctcaatcctctgggcccagctgatcctcagcctctcgagtagctgggaccacaggtatacgccatcacgcctggcttttttttttttttttttttttttttttttttgagacggagtctcctgtcgcccaggctggagtgcagtggcacgatctcagctcactgcaagctccgcctcttgggttcaggccattctcctgcctcagcctcccaagtagctgggactacaggcgcctgccacgacgccgggctaattttttttttttttttgtagttttagtagagacggggtttcacc[140 bp omitted]tgcccaggctggtctagaactcctgggcacaagcgaccctcctgctgcagcctcccaaagtgctgggattacaggtgtgagccactgtgcccggccaagtctaagttctttcttttttgtttgtttttttttgagacagtctggctctgtcgcccaggctggagtgcagtggcacgatctcggctcactgcaacctccgccacctgggttcaagcgattctcctgcatcatcttcccaagtagctgggactacaggcgcctgccactacgcccagctaaatttttgtcatttttagtagacaccgtgttggccaggctggtctcaaactcctgacctcaagtgatccccccgccttggcctcgcaaagtgcagggattacaggcatgagccaccgtgccccgccaagtcttaagtttttaactaccacttctccggtccagatatcccaaaatctgacacacagaccacaggatgggcaggggcggagggcaagatcattttccgtggcatttagaagatcataattacgtatatggccttggttttggtggaggagtgaggagggccgttgcaggactggaggaggctgggggaagaggaagccagggggcggggaggggcctcaccagatgccacgggcgtcgggccagtcgcgggccatgcctgaggccagcagcagcggggacacgggcttgtcgaacaggaagtggtcatcgatgagctgctgctgctccttctccgtcatgctcttcagagggtagtacttccctttgaactcgcccgtcaggctgttgagagctatggggacacacgagggagtggtcagcagcctgtcccacctcaaccagggtgtggaggcccagggtttcccctgctgctgctcctaacgggcctgggccttggccccctggatgtcctaaaggcacctgaaccctgtgtctaaacccacacttgtgacggctccccaaaatctgttcctgccatctgtccaggcccccaggaatggccaccccatgtgctcaatctggaaaacagacccacctcttcccctgagggaccctcacatccaatccacctgcaggccacagtgtgctggtgcctgctcctaatggctggcaacacagatggctgaagtctcaggactttgagaggccattagtaaaaattattataaagtagaatggtagccaggtgcactggcacgagcctgtagtccagatactggggaggctgaggcaggaggatcacttaagcccaggagttcgagtccagtctgggtaacatagcaagacccccatcttttttttttttttttatgagacggagttttgctcttgttgcccaggctggagcgcaatggcgcgatcttggctcactgccacctccgtctcccgggttcaagcgaatctcttgcctcagcctctcaagtacctgggattacaggcatgcgccaccatgcccggctaattttgtatttttagtagagacggggtttctccacttgggcgcctggcccaagaccccaatctttaaaaaaaaaaaaattgtaggctgggcgcagtggctcatgcctataatcccagcactttgggaggccaaggcaggcagatcacttgaggtcaggattttgagaccagcctggccaacatggtgaaaccccgtctccactaaaaatacaaaaattagtcggccatggtggcacacgcctgtaatcccagctactcaagaggctgaggcacgagaaacacttgaacccaagaggtggaggttgcagtgagctgagattttgccactgcactccagcctgggtgacagagtgagattctgtctaaaaaaaaaaaaaagaaaaaaaattgtgtgtttatttgtatattcatgtataaaatatgtgtataatgaatttgtgtttgtgcatatgtacaataaatctataatatttatatatcttatacatattcatataatatacagacatacctcgttttattgcattttgcagatactgtgttttttacaaattggaggtttgtggcaactctttgtccagcaggtctattggagccatttttcctacagcatgtgccacttcgtgtctctgtgtcacatgtgggtaattctcacagtactgcagactttctcattattactatatctgtcatggcgatccgtgatcagtgatctctgatgttactgttttaattttggggggtgccaccgaccttgcccatataaaagggtgaacttaatggataaatgtgtgtgctcggactgccccactgaccagccattccctcatctctccccatctccttgagcctccgtattccctgagacacatgattttgaaatcaggccaattcagttcataaccttacaatggcctcgaggtgtt[131 bp omitted]agaccagcctggccaagatggcgaaaccccgattctactaaaaatacaaaaattagccaggcgtggtggcgcatgccggtgatctcagctacttgggtggctgagacacgagaattgcttgaaccacgaggtggaggtaacagtaagccaagattgcaccactgcactccagcctgggcgacaagagtgtggctccatctcaaaaaagagattcttttcaaactattactgctggccaggcactgtggctcacacctgtaatgccagcactttgggagaccaacatgggaggatcacttaagcccaggagttggaggttatggtaagtcatgattgcaccactgcattccagctgggcaacagaacaagaccctgtcttgaaaagagagagagaaagagaaggaaggaaggaagggaggaagggagggaggaaagaaggaaggaaggaaggacggagaagaaaagggaagggaagggaaggaagggagggagggaaggaagggaaggaagggaggaagaaaagaaaggaaaggaaggaaggaaggaaggaaggaattgccgcagccatctcaaccttgaacgacaaccgccctgatcagtcagcagcccatcaacatcaaggcaaggccctacacaacagaaaggttccaacttgctgagtcctcaaatgatcacaacatttttagcaggattttaaaattaaggtatgtacttttttttttctagacataatgctattgtgcacttaacagactacagtataggataaacataacttttttttttgagatggagtcacactctgtcccccaggctggagtgcagtggcgtgatctcagctcactgcaacctctgcctcccaggttcaagcgattctcctgcctcagtctcccaagtcgctgggattacaggtgtgtgccaccagacccagctgatttttgtatttttagtagagatggggttttaccatgttggccaggctggtctcaaactcctgacctcaaatgatccacctgcctcagcttcccaaaatgctgggattacggtgtgagccactgtgcctggcctctttttatttgtttttgaggcaggttctcactctgtcaccctggctggagtgcagtggcacaatcacgattcactgcagcctcaacctcccgggctcaagtgatcctcccacctcagtctcctgagtagctgggatgacaggtgtgtgccaccactcctggctcatttttgtcttttttgtagagacagggtcttgctgtattgcccagtctggtcttgaactcctgggctcaagcgaccctccctcctaggcctcccgcactgctgtgggagccactgtgcccggcctcaactcctcctatctgaggtggctcccctcggtcattctccaccacacccatgtcttggcttcatggcacttttgaattatcttgttcatctgtgggtttctgtatttcctcttgtctccccaccagctgaacactctgtgagaacagtgagggacccctatctccccacacagggcaagaacccctggaaatgtgtgctggatgaacggatggcaggacgctgggggcagccaggtgtctgcgtaggtcttctcaggggccgtcgggtctggacagcatccctgaatctccaacacagcaggtaatgctgacagcccgcgccattccccaagcccccacgatttaccaagctcttcccctactttgaaaagcgggggcccaaagagacccgaggacctgcccatggaggaacagagccagggctgggtgaccccagcagtggacggggtaggggcgctcaccttccacagagagcttctccaccgcccggcgctcgccacgggagcagtgtgggggcaacgtgtagcccttgatgctgcggccagtgcggacgcggctgctgagcacgtagttagggtccaggtcgtctccaccctggagagcgggtgggagatcaggaccaggcagatcctccgccctctccagcaagcccaggtctcccccagatgctcccctcagtctccctgttgcttcctttgccttctgcatcctcactgattgggtgtgtggagcctctccccgccacccatacctgggctctgtctctcccttctctgtctctctcccctctcctatctctgtttttctttatacctctctctccccatcttcgtatatttcttttccttttttttcttcgagacagggtctctctctgtcgcccaggctggagtgcagtggtgccatcatagctcactgcaacctcaaactcctgggctcaagcaattcccctgcctcagcctcccaagtagctgggactaacaggtaggtatatgccaccatgttcggctaacttaaaataaattttttataaatagagacaggggctgggcgcggtggctcacacctgtaatcccaacactttgggaagccgaggtgagccaatcacctgaggtcaggagttcgaaaccagcttggccaacatggtgaaaccccatttctactaaaaatacaaaaattagctgggcgtggtggtgcgcgcctgtaatcccagctactcaggaggctgaggcacgagaatcacttgaacctggggatcaggggtttccgtgagctgagatcgagccactgcactccaacctgggtgacagagtgagattctgtctcaaaaaaaaaaaaaaaatagagacagggtgtcactatgttgcccaggctggtctcaaactcctgggctcaaacagtcctcctgcctcagcctcccaacgtgatgggattacaggcatgagccaccatgcctagctaaatttttaggcttttttttttcttttttttgggcagagacgggttcttgctatgttgcccaagctggtcgtgaactctcctggcttcacgtgatcctcacacctcagcctccataagtgctgggattacaggtatagccactgcacccagcctttctgcccatttctgtttctcttcctgtctccctttctcccactctccttgtctgtgtctgactgcaactgcgtgtgtctctctctccctgtctctcctgccttctctgatgctcccttctgtctccctctgtgtctctgcctctccccccacccttttttttttaggcagagtctcgctctgtcacccaggctgaatagctaggattataggtgaacaccagcatgcctagctaatttttgtatttttaatagagactgggtttcaccgtgttggtcaggctggtctcgaactcctgaccttatgatccgcccacctcagcctcccaaagtgttgggattacaagcgtgagccactgtgcccggctatgcctcttccttttctacatgcttttgtgcctttcttctccctctccctctcctttgtctgtctgtctccttggttgtctgtgtctccttggctgtctctgtgtctctctgtccctctctctttcctttttttattttctgagatagaatcttgctctgtcacccaggctggagtgcagtggcatgatctcagctcactgcagcctccatctcctgggttcaagagattttcctgcctccacctcctgagtagctgggattacaggcacgcgccaccatgcccagctaatttattttatttatttatttatttattttttgagacgagtttcgcccttgttgcccaggctggagtgcaatggcacgatctctgctcaccacaacctctgccttccaggttcaagcgattctcctgcctcagcctcccacgtagctgggattacaggcatgtgccaccacacccagctaattctgtatttttagtagagacggggtttcaccat[140 bp omitted]ccaggctggtcttgaactcctgacctcaagtgatacgctcgcctcagcctcccaatgtccctctctctttccatctctctgcttctccacacctctgtgtctctctctgtctctgtatttctctgtctccccccatttctcctgtgatctctctcctcctcacccctcggccctcccctcctgcgcagacaccgaccttgaggttttcatggttgaggtcagtcttgtgcttgtcagtgggtttgtagcccccgtggcgatccgagatgatggggtcaaagagttccttgaaaacttcgtaggactcctcatcaccagccacgcagcccacggtcatgatgaaggggtgacctggaggggtgggggtgaggtcagagctgcttgtccccagcaaacagggcgtgggcttgtgggctcagtggagcctgtgtggacatgtgtgtcgggatgggggcgggtacattcaatacctctgggtgggaattgagaatcataagggttgggcacagtggctcatgcctgcaatcccagcactttgggagggtgaggcgggtgaatctcttgaggtcaggagtgtgagaccagcctggccaacagggtgaaaccccatctctgctaaaaatacaaaaattagctgggtgtggggcacacacctgtaatcccagctactcaggaggctgaggcatgagaattgcttgaaccaagggagtggaggttgcagtgagccaagatcacaccactgcactccagcctgggtgacagagcaagactctgtctccaaaggaaaaaaaaaaaaagagagaacactgaggactggtgggaactgggagggaaggctgggagaggtcaaggtggctgggaggggtcaaggtgggagagaagaaagagtgctgggggcggggtcaaaggagaaaggggagcttcagagggtacatggtgctaaaagcatcagcacctcggaaacattagcacccaaagtcatgacatcttagcctgaaatgttaggatctcaggctaccaccgtaccacagagggtcaggagggtaagagacttgaaagaccctcttgtttcccagtggaaaaacaggggccaggagagaggggcttctccccggcatcacacagtgagctggatgtgaggggcactagagcctcccctccactcccagctctcttcgccttgcaatgtcctttgagaaacaaccataacattaataacatcccctgtcagattctttttttttttttttgagacagggtctcactctgtggctggagtacagtggcgcgatctcggcttactgcaacctgcacctcccaggctcaagcgatcctcccaccgcagcctcctgagtagcttggaccacaagccctcatcaccacacttggctaatttttttgtattttttgtagagacagggtcttgctatgttgctcaggctggtctcaaactcctggcctcaagtgatcctcccacctgggcctcccaaagtgctgggattacaggcatgagccactgcacctggcccccctgtcagagcttgagcactcacttggtgccaggtgccactctaagcactgcacagccattgacttgtgttttcacaacgtgggcgcccatttttcagatgaggagactgaggttcaggaggtgaaccgacctccttggggatctcacattattctcgtgcatgtttattgcgtggtttgctgagtacctcgcactgtcccaagcctttatgtatattaatgcattgattcccacaacagccccattttacagatgagaaaactgaggccccccccccttcaagggtggtgggattggggcatggccggcagcctccagagcccccatgtagccccttcagtgctccactggggaggctcacctgggttgtccactcctgtctggatgacatcgtctacagtgaagccagatggagtctccttgtcccgcagcttcttgtagagttcaagggtcagtaccttggccatgtggttgttatgtttgctgaggtcggggtactcctcctcaggcttgtaattcagcttgaacttgttgtgggtgttaccgaatggcatggtggcggtgtaggagacctgatgggcagggcaggaggggaagattgaagattagctggcatcttttttcttcttcttcttctttttttttttttgagacggagtctcgctctgtcacccaggctggagtgcagtggcacgatctcggctcactgcaagctccacctcctgggttcacaccattctcccgcct[221 bp omitted]ccaggttggagtgcagtggcgagacctcggctcactgcagcctccacctcccaggttcaagagattctcctgtctcagcctcctgagtagctgggattacaggcgcacaccaccatgcctggctaatttttttgtatttttattagagatggggt[153 bp omitted]aggcgttggggtcaggcaggctgtgtaacttggagcaagagaaatcctctctctgagcccctgtgtctcagcaggaaggcatccggagtcttagatcaagggcctggctctgccgtatcccagttgggtgagcctggactagtcattcttgctggaaactcaatttccccaggtggaaaacgggcccctcccggaggctggaaaaatattttgtgtgggtaagagtgtaggttctggaatcagcccagggtttgattcccagctctgctacctacaaccagctgtgtggccaggggcaagttgcttaacctctgtgcctcaatttactcatctagaaaatgaggatcctaacagcacttgccgcatgggagtgttgaaaagattaaatgtgtgaatacaggtgtagctctcggaacagtgcctggtacac[133 bp omitted]caagcaactatcctgcttcagcctcctgagtagctgcaactacaggcgtgtgccacacctggctatttttttttttggtatttttagtagagttggggtttcgccatgttggccaggctggtcttgaactcctgaactcaagtgatccgcccacctctgcctcccaaagtgctgagattacaggcatgagtcacggcacctggcctgttgttgttattttaaaggttcgtgcgaggagctggtgagaaggtggaggtgagggtgctgctgggagtatgtgagcaggttcttggattatcaatccaaagacaaagggctgggtcgggggagggctgggtagctgcccccacctctgcctgctgacagttctcccacagggctcagaagggaagaaaagctcagcctctgggtcgtcagaggcaggttcaaatcccacctatgccatttccctgctgtgtgaccccaggccagtcactaggcctctctggacctctgtctcctgtgaactgagcctgccccgtaggattgccaggatcctctgagcttggccatgaggttggctgagcacaggccctggcatggagttggagcctggaaccctggtggctgctattattgttatttgttattactacttttttgcagagatggggtctcactatgttgcccaggctggtctgggactcctggcctcaagtgatcctccagcatcggcctcccaagatgctgggattatgcgtgtgagccactgcgccaggtcctactgttattattattttattcactggacccagaaaggagaagggacccagaaaggagaaggggcctccagcagcggtgggagacggggatgggaagcaggtgggattgtgggagggagattgggaccacggtgagctgaagccagggaagaggaacagggacccgccaaagaccttgggtgctgctgtccagggtggttatttttagaatctggcaactgcctgccatcccacccccagctgctgccccgccccacccccacattccggggctcggcttgcaccaagtcagcaggcccaagacaggtgggccagggtggctgggaggacacgggtccaggcctcggggctcaaggacatcctgggatggcagcccagaccccctcccttcagaggatgcccccctaatccctgccagggacaccccaggagagggcactgaggcagggtggtgaccccccccacaagagacataagcagaaagccccagagccacacacccccaccaccgcagactccccagatcacactgtaaactaagtcacacagtcacacttccaaactcaaggacatgcccaggacactcatgtgtccgctactaagtcagaaacaaggtcacagggacccacacagtagcaaacgcaaagaaagcctgcgacacctgctcttgcagactctgctaggcgacagacacacctcccacggcttgtggcgccagtgttggcgacaaactgtaatgaacacaggcctggctcaacagccccttgcagggggtgacagttggcagctgtcaggacccctttcatctcggatccctccccataacccaagacttgtgccgcagaaatcacaggtcccagtggggggttcaggcagcctcacagatggaggggcctcccagacacacaagggtcaaccttcccacgcaccgacctgcctttgtataggaggatgttggtggagcaaggggtgacacacagaccctttcccaagccaagcctctagcacccacagaaatcccctactctggcccccacccagattcccgccccgtgcagtacctggctgggctgggctgaaggggggctgtctgtatcctggaggtgacactgacccaaaggaagggccagcagccgtggccttatatagggggacctaggctgtgctattggctgggaggggttgtccccagggaggagttctggagggcagctgagcctctcacctccctgctcccgcaccatacccaccctgaacccaggcatgctttgcgcccagccccatggccttgtatgggctgagccgccccaggggctgggctcacgcccccccaccaagctgataccctgaccaagtgctgagttgggctggcggtggggacagctggccccccgccgggaacatgggacggtggctgggaacgtcccaagcacgtagaagccaccgtcccctggcccctgagtctccttcagccaccagcccttcctgtggccctcggctccccctgtgccccctgggccctcacccctacccgagtcccagcggcacctcggggaaccaaggtgtggctccaggaggagcagataccctgtgagctggaggaagcagaggccgggagaaggaccaattgcaatggagggcagtctaaccccagaaacccgcgcttgggcgccccttcctcctagggactgagtggaggggaaactgaggctggctgagttggagagattcaaactcagggcaagggtgggaggcggtggtcaccctcccccccacttaaccctcgccccctcggtgccactgggagatttccgctgtgcgggggacagggagggtctcggtcgccgggaaaggagttatttttagagggcgctttgctgtctcctctgccgcaaaggccgagacccgaggcgctgggtatgggggggttcgggggcaggtgttggaggggggttcgccacgtgtcctggttaattataaccgggcgtctcgggtgtcctcgggcctcgcctccttacaagggcagccacggggccctgggtggccgctcccacctcccggggaagggggctgggcagcgacgccgttcagagcgcgggcgccagactcgcgcagatctgggcagagcaagcgctctcggcgcctcggctgtgagcaaggacttccagggctgagaggggggttctgtggaggagagtacagtatagaggaagccgctttctcctcctgggacgcgccaggattgcaggctgatcgggtctcctcctccagggagctcccaggattgcgacgaagaaaagaatgtcccttccctctgagttcctccctatcccagggtctcctgggtctccttcacatcttcttaggcaggtgaggactggcttagagaaagggagcctctgtgcctctccctcagactcctgatctgaggggggaggggagaggggtgctttagaaatatttacatggggcccagccctttcccagcaagctcagattgccgagggtctccttcacggttacggaaactgaggcccagaaaaccaaatggaactggtctcgaaacagggatctatcaggcacttcctgaggctacaacaaaacacaaaacccccgccgtcctggaggtgatagtgcaagagggtcacagatgaggggacggcacagcagcaggggaggtcgaggcaggcctctttgggaagatgacatctgagcagagacctgaaggagaacagggagccagccatgtgcggctctggggggaacagcaggtgcaaaggcgctgaggtgagaatggctgggcacatctgaggacagacaggaaggaggccaggggactggagcagatggggccaaggagagagtgggaggaagaagatgaggttggaggggagacaggagcagacccatggtgccctaggggctgtgggaggagttttaatcccattgtgattgacagtgaaaatgttagatgggccgggcacagtggctcaggcccgtaatcccagcactttgggaggcagaggcggaggcgggtggatcacttgaggccaggagttcaagaccagcctggccaacatggtgaaaccccatctctactaaaagtacaaaaattagcctggcatggtgacacacgcctgtaatcccagctagccaggaggctgaggcataagaattgcttgaacctaggaggtggaggttgcagtgagctgagatggcaccattgccctccagcctgagtgacagagcaagactcagtctcacaaaaaaaaaaaaaaagaaaagaaaagaaaaagaaaatgttaaatgaaccaggtatagaaagacaaacatcacaagttatttgtgggatctaaaaatcaaaacaaggaggctgaggcaggaggattgcttgaacccaggcagtcgaggctgcagtgagctgtgatcgagccactgctgcactccatcctgggcaagagagtgagaccctgtctcacacacacaaaaattaattaaaataactaaaggagtataattggattgtttgtaatataaaggataaatgcttgagaagatggataccccattctccacgatgt[141 bp omitted]agaaaccctgtctctactaaaaatacaaaattagccggggtggtggcacatgcctgtaatcccagctactcggtaggctgaggcaggagaatcgcttgaactcgggaggcagaggtttctgcgggccgaaatcgcgccattgcactctagcctgggcaaaaagagtgaaactccatctcaaaaaaaaaaaaaaaaaaaagaacaaaacgtttcatataccccataaatatacacacctactaaatacctacaaaaaattttttagaataattttttaaaatattaaatggaaaaaatcatcatcatcatcccactgtgagactgacaggaggcactgagggtcataagcagggaagaggctggatccatgccacacgcattttgggtggcacggtccagccacaccttgtgggagggtttgtttttttttttttttttttgagatggagtcttgctctatcaccaggcaggagtgcaatggtgcgatgtcagctcactgcaacctccgcctcccaggttcaagcgattctcctgcctcagcctcccgagtagctgggactacaggcatgggccaccacgctctgctaacttttatatttttagtagagaaggggttttgccatgttggccaggctagtctcagactcctacctcaggtgatccacccacctcggcctcccagagtgctgggattacaggcgtgaggcaccctgccgggcccattgcacattctttttagccacacagtgccagaagccttttctatgttcggggattccccactgtaagccctcctcctttggagaagccaaagatgccagaaactcaatttcccagaatcccttgcagcaatggtccaggccagtgacctgggctgagccaatcaaacgctccagcaggaccttgtgccgtgagctccctctgctttgagtcttaaagaaacagttggccttggggagctttacaaccctcatcacgtatcttcatcccaccccccagagcccgactgtcaatccgacctctgcccctccactgcccactctagctcaagaccgcctccactgtccctcctgacccaacttcctccctggactcctgtcccagtctttgccattcccacctaaaccctacctgctgacctcccctcctcagagcttgccatggctccccagtgccctcaaggtaaatgagtatttgttgactaaataaataatagtaactgtatctggcagatgtaggcgagagtaaccactacccagcttaaatagaaaggactctgctattggctgggcgcagtggctcacgcctgtaatcccagcactttgagaggccgaggcgggcggatcacgaggttaggagatcgagactatcctggctaacacggtgaaaccctgtctctactacaaaaatatacaaaaaaaaaaaaattagccgtgcgtggtggcaggcgcatgtcgtcccagctactccggggcctgaggcaggagaatggtgtgaacccgggaggcggagttgcagtgagccgagatcgcaccactgcacttcagcctgggcgacagagcgagactccatctcaaaaaaaaaaaaaaaaaaaaggactgtactatcatgtattaggcactgacaaaatcgttggaagggctgaaggaacactgctcgggccccagaactactttcctactttccctctggaaaatctagtctttagctttccagcctcttcattgacaggagaatgtgctcgaaggaggttaacatggacattaaacagccactccacaaagaagcttttgtttgtttgtttgtttgtttagacatgggttcttgatggggtctcgctatgttgctcaggctggagcacagtagttattcacaggcacaatcagagtgcactgcagcctccaattccaagcctcaagcaatcctcccgcttcagcctcccgagtagctgggactacaggcgcgcaccaccactccaggccctgacagttaacttttattgaatacacctgtatgtcaagtactgtgctaagtgctttacatatgttgacttatttaacgtccccaacaataaggctcagagaggttaagtgacttgcccaaagtcacacagctggaagggggcagaactgggaatcaaacaggtacaaggctgccaagaatggattcaggctttggtggaaataacttccaggcttctccccgacgtcagactgtattgtcagcctctttctaggtcatcaggctctagtgtacccacttccccaacccatctcccatcaccccagccatctgacttcagggtccaaggactttaatgggtattcactagtttaattttccaacagtcctatgaagtgagtactgccaatttttttttaatttacttttcttctgggagtctagaaggtactgccgtttttacaaatcaggaaagtaaggctggcccagagaggttgcaacacttatcgaaagtcacacagcagggaagtagcagaacaagactggactaggctgtcagtcctggagcttgtcttcctaatctcttcctgatccccacttcttcatgtcgaacccccttttcacagaggacgaacgctggggccgaaaagggcaagggagttacctaaggtcacagccagtataactggaattacagtctacactcttctccctccattcccaaggcagccctgccctcaaaccctgtcttactcttaagcatctcatctgtctctgtccctaccctcaggaagaggctgccacctccaggagagactctgggagggcagcactccacccccatggcccaccaccctgtaatgccctcccccatgcactcctcaaatccctttcccaaaccgggccatttacgatgccatttgattcatagaagacaagttgtaaatcaaggccagacccagggctggggagttgagaccctgcccattcctcctttctcttcctggagagccaggccagcctgcagccccataatcagctgaccagggtctggtccatagggtagtgggtggtgaataaaataacgtctttcatggctcccaacttgtcctgccccagtctctccaaatcaatcaatctttttttttttctttgagagggagtctcgctctgtcacccaggctggagtgcactgattcgatctcggctcactgcaacctctgctttccgggttcaagccgttatcctgcctcagcctcctgagtggctgggattccagctgccatccaccagccttggctaatttttgtatttttagtagagacagggtttcaccatgttggccaggctggtttccaactcctgacctcaaatgatctgccctccttggcatcccaaagtgctaggattacaggcaggagccactgcgcctggcctaatttttgtatttttaatagagatggggtttcaccatgttggccaggctagtcttcaactcctgacctcaagtgatccgcccgtctcagcctcccaaagtgctgggattacaggcatgagccactgcacccagccccagatcaatcaattttatcaaattagctatacatttccctctaggtgctgctttaggtttatcccaggttgttttttgttttgttttgtttttttcttgatgttgtttgtttgtttagagacaggatctcactgtctcccaggctggaatgcagtggtatgatcttggctcattgcagcctccatctcctgagctcagcgatcctcccacctcagcctcctcagtagctgggatcacagatgtgtgccaccatgcccagctaatttttgtatcttttgtaaagacacagtcttgctatgttgcccagcctggtcttgaactcctgacctcaagcaatcctcctgcctcagcctcacaaagtgctgggattgcaggtgtaagccaccatacctggcgtgttttttttttttttttttg[132 bp omitted]caccacatccagctaaattttttgtgtgtttttcgtagagacagcgtttcactgtgttagcctggatggtcttgatctcctgacctcgtgatccacctgcctcagcctcgcaaagtgcttggattacaggcgtgagccaccggcccggcccatacctggcctgtttttatattctattatcatttcaaatgtatttttattggaactgttatatttggagtgtatggatgttcacacttattcatattttattttctcaaatttactcttttttttttttttttttttttgagatcgagtttcgctcttgttgcccaggctggagtgcaatggcggatctcggctcaccgcaacctctgcctcccaggttcaagcgattctcctgcctcagcctcccgagtagctgggattataggcatgtgccaccatgcctggctaatttttgtattattagtagagacaggatttcaccacgttggccaggctggtctcaaactcctgacttcttgatcctcctgcctcggcctcccaaagtactgggattacaggcgtgagccactgcgcccggccaaatttactgtttttattgaggcataatttattttctttccttccttccttccttccttccttccttccttccttccttcctccctctcttcctctcttcctccctccctccttttttttttttgagacggagtctcaccctgtcacccaggctggagtgcaatggcgtgatctcggctcactgcaacctctgcctcccgggttcaagcgattctcctgcttcagccttcagagtagctgggactacaggtgcgcgccaccacacctggctcattttttgtatctttagtagaaacggggtttcaccatgttggccaggctggtcgaactcctgacctcgtgatctgcccacccaggcctcccaaagtgctgggattacaggtgtgagccaccatgcccggcctattgaggcataatttctatttggtgaagtgccctaatcttaaaatcaatgaacttttatattcgtgtacatgtgaataagcatcaccaggatctaaacagagactactaccagctcccaaagaaactctctcatgtcccctcccagtgaatgtctctctctcctccaagaaaatgttctcgctgagcgcagtgggaggcct[135 bp omitted]gaggcaggagaatctcttgaacccgggagatagaggttgcagtgagccgatatagtgccactgtactccagtctgggcaacaacagtgaaattccatctcaaagaaaagaagaaggccgggccaccctctgcctcctgggttcaagcgattctcctgcctc[134 bp omitted]gcctgaaaagtgctgggattataggcaggagtgaccgcgcccggcccatttgtctaatttcttttgctcaactttttttctcttcggattcctttttttctttctttttttctttttgtacagatggggtgggtcttgctatgttgcccaggctggtcttgaactctcagcctcaagtgagcctgcagcctccaattccagggctccaggcttagcctcccaaagcgctggtgtggcagagaatagggaattagggtaactgggggttcatcaggtacagccagtttgcataagcaacagaatagcaggtgcagtcagttcatggaggcaggagagccacaggtgcatacaggctctattctccctcccatgataataagccactccagcctctgattgactgcgagccaggtctccacttgggctctgattggtcatgagccaacccttcatagagtgtaaccaattggaggcctctgaagggcacctaggggtgttgccgggtcctttttagcttaataaaaaccctaactggcaggcctggcgcggtggttcgcctgtaatcccagcactttgggaggtcaaggcggccaaatcactcaagatcaggaatttcggaccagcctggccaacatggtgaaatcccgtctctactaaaagtacaataattagccgggtgtggtggcgcatccgtggtggctcgtgctaggagtcccagctactcaggaggctgaggtaggagaatcgcttgaacgcgggaggtagaggttgcagtgagctgagatcatgtcactgcactccagcctggtcaacagagcgagactacgtctcaaaaaaaaaacaaagacaaccctaattggggaggtgctccagcccgctcccactctgtgaattgtcttggataaatctctgctttgtcttctgttgcttcgttctttttttcctttttctttttattgaaacagactaccccaaaatgcaataactttttgtttgtttgtttgcttttgagacggagtctcgctctgtcacccaggctggagtgcagtggcgcaatctcggctcactgcaagctccgcctcgtgggttcacgccattctcctgcctc[224 bp omitted]cccaggctggagtgcagtggtgcgatcttggcgcactgcaatttccacctcccaggttcaagcgtttctctttcctcagcctccggagtagctgggttacaggtgtgtaccaccacacccagctaatttttttttcttgaaattttaaaatctctcaaaaacttatacaggtgaattttgatcgtcatgatgggcttattggtaggatttttggtaacaagcacgggcaccaggacctccaaactttttggactcagagcgacggggatcagctaccagcagggtctggtcatactggatgaggatgtctttgatctccttggaagactcatccgcatatttctggtactaggccaccagggctctggagatggactgacagcataaatctaggccccttcacatggacatggatgtccacaccagcaaatcgctccttgccgggaccgagaaagagaactggctccagcagcttgtatcgtagtgtgcgcagcttgatcatctccaggagccgcccattcaccttgatgaggccatcgccgtgtttgcagtgcaccacagctgtggctgttttcttgccaccgaagacctgcacagattgcagctggccctcggaccgcatggctgcgagcgtgaactagagaccctcaccacgtggtgctgcaatcagaaaaaaaaaaaagctaatttttttttttttttttttttgagagggagtttcgcccttgttgcccaggccggagtgcaatggcgtgatctcggcttactgcaacctccgcctccccggttcaagtgattctccagcctc[134 bp omitted]cggtctcccaaagtgccaggattacaggcgtgagccactgcgcctggccattttatttttatttttatttttttacattttatttttggttcatggttttttacattttattttggtacaattttattttggagacaggttcttacctcttgccccactctttttcacccaagctggaatacagtggtgccatcatagctcactgcaaccttgacctctggggatcccacctcaatctcccaagcagctgcaactacaggtgtgcgccaccacacttggctcattttaacttttttttttttttgtggagatggggatcttgctatattgcccaggctggtctcaaactcctggtctcaagcaatcctcctgccttggcctctcaaagtgctgggattacaggtgtgagccaccatgcctggtcaatagctctaaaatggatgtggggttggctgacagttggccaatccaggccgggctcagatgggaagttctgcttcatatgggaaccttgtggagtgcaggctgaggggagaggaagctctcaggggaagcccgtctcatggtgatgctgagatgcaaaaagaaatgttcaaggtctcttgaggcctaagctcagaactgacacgactgtcacttgtgcccctctgctattggccaaagcaagtcacatggccacaccaaaagttcaaggcccatcattttgtcgtcctccacaggtaaggattatatcaggtgtgcttttcttaaatgggtccacacactcgtacatccacacacgatcatattcatggaatatctctggaagtatattggaaacggtcatcaggtttgcttgcgggaagggtgtccggggatcagggagagagaacgcttactttcactctgtagtcttttattctctgtgtctatgaacgttttttctgactgcattccctttttttttttttttttttttttttgagatggagtctcactctttcgcccaggctggagggcagtggtgctatcttggctcactggaacctctgcctcccgggttcaagcaattctcctgcctcagcctcccgagtagctgggactactagcacgtgccaccatgcccggctaattttttgtgtgccttttttttttttttttttttttgagacggggtcttgctctgtcccccaggctggagtgcagtggcgcgatctcggctcactgcaatctctgccttctgggttcatgccattctcctgcctcagcctcccgagtagctggggctacaggcgccagccactgcacccagctaattttttgtattttt[145 bp omitted]tggccgggctggtctcaaactcctgacctcaagtgatccacctgccttggcctcccaaagtgctgggatgacaggcgtgagccaccactcctggccattattttttaaattaaaaaattatggccagaaggtgaaaatagaaaagctcccatcctatgtacccattttcctgacgtggcaaactaaggccttaagggatagggtggagtatttgttggatatgcaagcaatttctcctctctgagcctcagtttccttttttatttattttttgagacaggctgtcactctgtcacccaggctggagtgcagtggtatgataatagctcactgcaggctcagactcctgggctcaagcaatccccctgcttcagcctcctgagttgctgagaccacgtgtgacacatcacacatggctaattttttttttaattttttttggcaggtgggtgacgcctgtaattccagcactttgggaggccaaggcaggcagatcatttaaggtcaggagttggagaccagcctaaccaacatggtgaaaccctgtctatactaaaaatacacaaaaattagccgggggtggtggcgcatgtctgtagtcccagctactcaggaggctgcggcaggagaattgcttaaacccaggaggcggaggttgcagtgagctgatatcgtgccactgcattccagcctgggcgacagagcaagactccatctcaaaaaaataaacaggctgggcccggtggctcacgcccataatcccagcagtttggggggctgaggtgggcagatcacttgaggtcaggagtttgagaccagcctggccaacatggtgaaaccccatgtctactaaaaatacaaaaaaattagccaggtgtggttcctgtaatcctagctactcaggtggctgaggcaggagaattgctttagcccagggcacggaggttacagtgagccaagatcacgccactgcactccagcctgggcgacagagtaagactctatctcaaaaaaaataaataaataaatttttttttgtagagataggttcatcctatgttccccaagttggtctcaaactcctaggctccagcaatcctcctgaagccctgggattacaggtatgagtcaccacatccggccagtttcctcatttttaggtggggctggtaatagtgcctaccttggggggtcagctacaaagattctggggctctgctactccttggctgtgtgacctaagacaagttactcagcctctctgtgcctcatctttttcacctgtggaatggagcgaatcatcgcagctggtgtgaagattaacaatttgtatataggagttggcacagggccagtctggggtaagaactcaaacatcagccattgttggcgttgtgcaa[221 bp omitted]gaggcaggagaattgtatgaacctgggaggcggaagttgtagtgagccgagattgtgccactgcactccagccggggagaaagagcatgactccgtctcaaaaaaacaaaaacaacaacagcagcaacaaaagcaagaaaggttttccttagttaacactttcttcttctttcaatctttatctcatttaagtctcacctcaatgctgtgtgatgagtgtgatcatccccattttactagacgaggagacagaggctcagccagagatcattgttcccccggtttacatggaacagaaatggcagggccaggatttaaacctagatctgcctggctccccgcccggctccatcccctgccctcccccaacacacatagtatttaccgggtgctaccctgttctaagccttttctgggggattatacagtaatcctcaccacagccttaaagtagggtaccctgtgagtctcgtttgacagactagaaatctgaggtccagagaggttacttcttggctcagagggtcacacagctagcaaatgacccagctgagatttgtccctgctggcctggctccagtccctgcactgcctgtggtaagcgtgtagcagatccagatccaatgtccagcgtcgtgaggccaaaaaaatggggggcagggggaaggctctgctgcccctcgatcctgtgctgttgaaatagctggagctagcactttggaaggccgaggcgggtagatcacctgaggtcaggagttcgagaccagcctggccaacatggcgaaaccctgtctatactaaaaatataaaaattacctgggcgtgatggtgcacacctgtaatcccagctactctggaggctgaggcaggagaatcatttgaacccgggagatggaggtttcagtgagccgagatcatgccattgcactccagcctgggcaacagagacactgtctttttttttttttttttaggggatggagttttgctcttgttgcccaggctggagtgcaatgacgccatcttggctcactgcaacctccgcctccctggttcaagtgattctcctgtcttagcctcctgacaagctggaattacaggcccatgccaccaagcccggctaatttttgtaattttagtagagacacggtttcatcatattggtcaggctggtctcgccctcctgatctcaggtgatccgccctcctgatctcaggtgatccgccctcctaggcctcccaaagtgctgggattataggcatgagccaccactcccagtgagatgctgtcttaattaaaaaaaggaagaaagaaagaaatagctggagcttggcacagtggctcatgcctgtaatcccaggactttgggaggccaaggcaggaggatcgcttgaggtcaggagttcaaaaccagcctgggcaatatagggagacccccatctttacaaaaaacaacaaaaagtagctgggtatggtggtgcatttgtagtcccagctacctgggacttgggaggctgaggagggagcattgcttaaacccgggaaatcaaggctgcagtgagttacgactgccactgcactccagcctgggtgacagagtgacacctgtcttttaaaaaagctagagtaggccgggcatggtggctgacgcctataatcccagcactctgggaggccgaagtgggtggatcacctgaggtcaagagttcaagaccagcctggccaacatgggaaactccatttctacaaaaatataaaaattagcaaggcatgatggtgggtgcctgtaatcccagctgcttgggaggctggggcgggagaatcgcttgaacctgggaagcggaggttacacaatgagccaagatcgtgccactgcactccagcctgggcaacagagcaagactgtcttaaaaaaaaaaaaatgctggagtagttaggatatgagtttgaatttttatttccatgattcaatcagcacctattctcccaaatgccttctctgcgttgggcctgtgctaggtggcactggggacacagtggagactgacatggcccctggccgcctcctcccttcttggggctcatagtctaatatgggactgacctgtctccccacactgatgacccagagttggcagggctggatgtgggagcccaagagcctggaaacctgggaaataagaaagggcttcctggaggaggaagcatcagcactggggctcagacaacagggaagtagagggcacgttggctgcaattcggagggagcgcggagctgtgccgagtctggagtttggtccacggaccagcagcgccctctgctggaagcatttcatagtgtagtgaccggggtaccgcgcgcattgagccatgtatgtatgtatgcatttatttatttttgagatggagtttcgctcttgttgcccaggcaggagtgtaatggtgtgatctcggctcactgcaacctctgcctctggggttcaagcgattcgcctgcctcagcctcccaagtagctgggattacaggcgtgcgctaccacacccggctaattttgtatttttagtagagatagggtttca[131 bp omitted]ctttggccagcttactattctaggacttgattccttcattcagtcacaatttattgagcaccgactttgcatcaagctcttgctgaagataacagtgctgacaatatacagccctgccctcagagcttatatagtagaggagaaaaagtgaacccataatatacagtcagtagcgagtatttactaagtactttctatttgcgaggccctgataaaagtactgtcctggccaggcgcggtggctcacgcctgtaattccagcactttgggaggtcgaggtgggcagatcacctaaggtcaggagttcgagatcagcctggctaacatggggaaaccccgtctctactaaaaatggaaaaattagctgggcatggtggcgggcgcctgtaatcccagctactcgggaggctgagacaggagaatgacttgaacccaggagttgcagtgagccaagataagatagcgccattgtactccagcctgggtaacacagcgagactgtgtctcaaaaaaaaaaaaaaaaaaaaaaaagtactgtccctgtattagttaacattcaattctcaaagccttagactatttatattttattgactagggaaactgaggcacagagaggttaagttacttgcccaaggcctgcacagcaagtaagtgccggaatcaaatttgaaccctgagcccaattcttagatatcacattcccttgccaataacataatatataacataacataatgatgtgatatatgttatataaaataactttaggggccgggggcggtggctcactcctgtaatcccagaactttgggaggccgaggcgggaggatcacttgaggtcaggagtttgagaccagcctggccgacatggcgaaaccccgtctctactagaaatataaaaagtagccgggcgtggtggcagacacttgtagtcgcagctactcgggagactgagatgggagaatcgcttgaacttgggaggtggaggttgcagtgagccgagatcgcgctactgcactccagcctgggtgacggagcgagactccctctcaataaataaataaggtaattttaggccctgaaaagttttgtgaacaaaatcaagaggagtatgtaatgttttggtggaagggtgccatttagaagggggcaatcagggaaggcctgccggaggaggtggcctttgagaagagacctaaagacgatgagatctgtgggaagagagatcgaagcaggccacacaaccaaggaaaaggctctggggcaggcactgcaagaaagccacctgtctgggatctaaagtttccaaagttttagcttggccaaggcccctgcgctacaatcaccctgattcgaggtgtcctggaggttaccagttccgcgtgcgaagttctgccattcccgcggggctggagccccgaggctgaacttcccacgggcggtgggcgtggccggctcacctgcgggggcgtggctcccggctgccccgcccctcggaggagccgcccgaggtcccagacgcccggcgcagcgggagcggcggggcgtgcctggcctgcgggacgcgactgatcgcagtggggcgaagcggggccggagccgcccgcggtcaggtgggtgccgggagtggggcgcgggactctcggagagccgcgatgatggggggcgggggcaaccctgggcccgctcgccctgagacggggaagggccttggggctcccggatgccccctgccccgtcctggggctctccgggatctggaggcctggctggggtcccatgccccccaccccagcgcaggtaaacagcgaggacggggcggggcctgggagggagagggagggggcccttgtgactgcgggtgagcctggtgcgcggggctgggcaggccagggtaagttggtgcggcttgcggggctgggccacgatgggagtctcctgcctgcctgtgtttgtgtgtgtgtgtgtgtgtgtgtgtgtggctttgcgtgtgtgtaagagagtgtgtcaggctgtgggtatgagggtgaaagcgactgtccgtgtaaccctgtgatgggactgtgtgtatgatgtgacacttttagcaatgtgaaaacgtgggcgacctctgactggaatggtgtgtgtgtagaattggattgctggtagcactttacgaccaagagctagtgcgactgtagtcgactttctgcttggcctgatgtgcatgtgtgtggctgtgtgtgtggctgtcttcatggcagagagtggaactggttgtaggattaggtgtgattgaccaagaggctgtgcggctgtggttgtctttctgcctgttggtgtgtgtgtgtgtgtgtgtgtgtgcgcgcgcgcgtgtggtggacagtgtggcactggatcagtgataggtgactatgattgacttttgattgtgtgtcactgtgatggtgcatggggctgggcggaactgtgtccagaagtggagctgtttcatgggacggtgcgcgtggaaccttggggttggatgagtgaggtgtggaggtgtgtgaagccgtgtgtgcgtgtgtgtgtgtgtgtgtgtgtgtgtagagaggaactagagggtgtgtgatctgcattgataccgtggctggcagtggtgtgcaacggagagtttgtgggagatgggagtggagacgtggacatttaagtgggatgctcctccaagcgggtgacaggatggaaaagggggtccgcgtcagggatcagtgtgtgggactgtgcctatgattatcagctgtgcggttgtgcacccggggctctgtgtgagtgtgggagctgctgtgtgtctgggacacagcccgagtgctggatggctgtggttgagccgtgtttgttgctgtggttgtcaatctggctgtggagtggtgtgtgtaaggctgtgtctgaggttatagagggaggttttacatcggcaaaattgtgtgaagaatggttgtggttgtcaggatgactcttgaacctgtgtggttgtgagttcaaccatttatgatgtttgtgtgtgaggtgtgagaataggtatggtgtgatatacacaagcacacagattggccgggtgcagtggctcatacctgtaatctcaacactttgggaggctgaggcggcggggattgcttgaacccaggaatcctagactagcctgggcaatatggtgataccccgtctctacaaaaacaaaaattagctg[134 bp omitted]gccaacatggtgaaaccccgtctgtactaaaaatacaaaaattagccaggtgtggtggcgggcacctgtaattccagctacttgggagggtgagggaggagaatcgcttgaacctggggaggtggagatcgcagtgagccaacatcatgccattgcactccagtctgggcaacagagcgagactcagtctcaaaaaaataaaattaaattttttaaaggttgatatatacatcacatatatacacatacatatatctagagagagggagagatcaatgacgatcaagtctgtggtgcacaaaacgtacaggacccttactgtatgtgatcgtgcatgtacaacatgtgcaaaaaccgctgggctgcttatggtggatgcagtggcttgagtgaagtgtgcgagaacgtggcatccctccacgcgtattcacagctctctgttccgacagtggagctgaatctgagtacttgtgtgtgcatggcgtgtaggtgtgggagtccctgctggccaggcctggagtgggagggagaggaagtagggaaactggcgagggatccatagtgaatcttgggagtgtgtgcatctggaggtgcgttgggcacattgtggggagttggctgcttgggagccatgtgagttcgggggacagcgagtgtcacggtcaagtgcaaggagatggtctgaatgtgagtgatttggggagtgggagagacagagttagtttctgcgtgggttggcttttctttcttttttttaaataatattatcactttttgacacggagttttgctcttgtcacccaggctggagtgtggtggcgtgatcttggctcactgcaacctccgcctctcaggttcaagcaattctcatgcctcagcctcatgagtagctggggactacaggcgcataccaccatgcctggctaattttgtatttttagtagagccggggtttca[144 bp omitted]gtatacagattgtttttgaaagaatagtatatgtgtgtgcctgagtcagtgtgttgtcttaggttgtatttctaaaaggaaaatgtaaatgtttttactgagttgtatatttaataggagaaagtgagtgcgtgttctaagaggagaatgtatattatgctgtcctttctttctttcttttttgactgggtcttactctttcacccaggctgagtgcagtggcactatcatggctcactgcagcttcaacctcctgggttcaagcaatccttctacctcagcctccaggtacaccatcaccacacccagctaatttttttatttttatttttgtagggatggggtctcactatgtttcccaggctggtcttgaactcctgggctcaagtgatcctcctgcctcagccaaaatcccaaagtgctcggagtacaggtgtgagccaccgcacccggcctacattgtgtttctaatgagggagtgtgtgtgtgtgtgtgtgtgtgtaactgtatttctgggagggtgtgtgtgtgtaccgtcttttttttttttttttttaaatgaagtctcactctgttgcccaggctggattgcagtggtgcgaccttggctcactgcaacctccgcctcccgggttcaagcaattctcctgcctcagcctcccaagtagctgggactacaggcatgcgccaccatgctctgctatttttttttttttttttccagtagagacagggtttcaccctgttggccaggctggtcttgaactcttggcctcaagtgatttacccaccttggcctcccaaagtgctggcattacaggcgtgagccactacacctggccccatgttgtattggagagaagggagagtgcgtgtgtgtgtcaaattgtatttcggagaggaaaatgtgtatgttgcattgtgtctttaagaagggagggtgcgggtgtgtgaggtgtttctgaggagtgtgtttgtgtgtatatgaggaccccagaggcaccaccagctaagtttctgtgaccttgtcacccacatacaaccacatgaagtcccatagaggggggcccccacccactatgagctgggcttcagactctcagctgtcacatggccagtgtgacatacctggaccacacctatcacacgtgtgtcccgacaggccctgggctggctaagcttgtccgatggaggagggcggagcccctgttcccccagggtccatctgttgcctgggagccaacacatggccccatcctcattccccccaacctagaggcctcctgggcttctgggggccctggcccctcggccctctcctcccaccccacccacccccagtggtctgactggttcccgacaaaaacaccctaagaatgagctcacgcagaggctgccgcctccacacgccccgcctcactctgccggcagaggagggtgcctctggtcccaggtcacacggccaaccgggagctctgggccaggggatccaagggccttggggtggggaaggctggccaggtgagctgagggcagatgggggaccccaggctagctgtttgctttctcttggttaattacacataggatttgggaactgtcctcagggcagaaccctgggttgggaggacagacgaaggtagacaagactgttccagatgagagctggctgggatgggtgtggagactgggatggagagggtgtggaggcagagggctggccaggatgggtggagcagggaagagccaggatggggagaagttaggggtcctgatggccattatgggaatagaggctgggggccaactgactggcccgggcaatgattccccaaacccctcaccattgctccccaggagcagcaatgtctgtgcaggtagcggctcctggaagtgcagggctgggcccagagcgcctgagccctgaggagctggtgcggcagacgcggcaagtggtccaggggctggaggcgctgcgggcagagcaccatggcctggctgggcacctggcggaggccctggcgggacagggcccggcagccggcttggagatgctggaggaaaagcagcaggtggtgagccactcgctggaggccatcgagctggggctgggcgaggcccaggtatgagggggccaggtggggagctgggggaaggtcagctgagggcggagggagggccaggcatgagggggacaggtatgtaggggactgggagagggttcactattgcagaggggcacactttgggaggctgaggtgggcagatcacttgaggtcaggagttcaagaccagcctggccaacatgggaaaaccccatctctactaaaaatacaaaaagtagctgggcatgagggctcctgtaatcccggctactcaggaggctgaggcatgagaatcgcttgaacctgggaggcggaggttgcagtgagtggagatcgtgccattccactccagtctgggtgacagagagagactgtcccaaaaaacaacagaaaaaagtatggcagagaggcacatccggggcagggggaggcctaggggaaccaggcctgggaaggggaggctccaggtcagagatggagtcccttggcagctttagggggtccttgtgtgtgacagggacccctgaaccagatggcattcttcagtaaactgtgggtcctagggcaagtttgggggtaaaatcagaggggcccctgggagcctctgagggcactggggccatgttggcagagtctctgcagaatctgggggtgtcgtgcatagtagtggggtgctacggcctgactcgaggcctgggctgggtcaggggccgtctggcagggcaggaaccaacctcgacttgggacccccaccccgggcaggtgctgctggccctgtcggcacatgtgggtgcactggaggcagagaagcagcggctgcgctcgcaggcccggcggctggcccaggagaacgtgtggctgcgggaggaactggaggagacgcagcggcggcttcgggccagcgaggagtccgtggcccagctggaggaggagaagcgccacctggagttcctggggcagctgcgacagtacgacccaccggcggagagccaggtgccacgggcagggcgaggcggggggtgctgggcccttcatagagccccacagtcccccagaccctccttagaatcccacagtccccaagatcctccttagaatcccacagtcccccagaccctccttagaatgccacagtcccccaaccctccacagagcccccagacccaccagaacttccacagacgcccccactagctactccacgaagcccccgagcctcgccagacccccagggggcctctgacgctcgtgaccaccacctccctcaaaccttgagataggctgggtgcggtggctcacgcctgtaatcccaacactttgggaggccgaggcgagcagatcacctgaggtccggatttcaagaccagcatgaccaacatggagaaaccccgtctctactaaaaatacaaaattagccgggtgtggtggcacatgcctgtaatcccagctactccggaagctgaggcaggagaatggcttgaacccaggaggtggaggttgctgtgagccaagatcgcaccattgcactccagcctgtgcaacaagcgaaactccgtctcaaaaaaaaaaaaaaaacaaaaaaacaaaaacctgagatagagccagggccccggtctctgaaacaagcccccaccaccccggccccccactttcctgtctctgcagcagtctgagtccccgcctcgccgagacagcctggcctccctgttccccagcgaggaggaggagaggaaaggtgggtgttgggagtacatgccacagaggatggcaggccagggtggggagggggctctgagctgcaggaccccaaaatctctgagccaggggatggggaggtgagggcagggtgaggaggaccctgaatgtgacagtgcaggtgaggctgggagccacaaagacagggtagccgctatgagcctggcaggccccgtattcacatcccacagggcaggtgggctgccgtgttcctgtcccgaggccaggatgcatcccaccagctggttagatgctagtgactcctatctcagaagttagcgtgggggcccatagtcccaggggccagttaggcagtccggcagttctgaggcacgtgtcccctcatgcgaggctggaggggcaggaggcttgcagtgacccagagcccaccccaccccacctaggtcctgaggccgcaggagcagcagctgctcagcagggtggctatgagatccctgcccgccttcggaccctgcataacctcgtgatccagtacgcggggcagggccgctatgaggtggcggtgcctctgtgccgccaggccttggaggacctggagcgcagctcgggccactgccaccctgacgtggccaccatgctcaacatcctggcgctggtgtaccggtgagcactgcggccagccatggctgggggcaggaacggcagggacccattgggtgcaagtggaaggatcctggtgccccctctgtcaccatggagcacctagggaggtcaggggaggggacagcaagaatgggaaaggaagggaaggctcctgctgtgagaacggcaaagagggagtgggacagggatctgggggggccactgagccaggcagagaggagtcagagagcacggacaccagggaccccaacagagcaggcaggagacctggggtggctagaagcttggcagaggtctgggggtacagggcccagtgttagagaattgcgaaatatggaggggcccacaaaaggccctcaaagggtgtgccacccatgcttggttcagccaggttccctgggcctgtcaggattggcccagcccctgtggctgcagctgccccaacccttggctaaccccctccattcctggggcgccccccacagggaccagaacaagtacaaagaagccacagaccttctccatgatgccctgcagatccgggagcagacgctgggccctgagcaccccgcggtgagtggggccccagggagacgaagtggggtcaaagtggggccacacctgcccatccctgacctgtgcctcccccaaccccgcaggtggccgccacgctcaacaacttggctgtcctctatgggaagcgtgggcgttaccgggaggcagagcccctgtgccagcgcgctttggagatccgagagaaggtcccatccccctcaccccaccccgaggaaccccttgtcccatgtagccctccccagggatgctgagcacgtacatcgtgaccctgaccctcgggccccttgcgtttggtattgggagaccccagttggagcctagatcacccaacccatcacccttgaccttctgagatcccagtttggtcttgaccctgactgacctctcgccttacctcacacatcaccctccaactgggtccccccatagcctttccaacccctcatggccaccagcacaagcccaaccctgacctacccatctcaccctgtgccccacgtttctggaccaccatgacctctgaccttggtaatcccgttagatggtataacttgtgtccccagcccccaacctctcaggtcactctctgctttgaccctgtaatccccaactcatgaccaccatacagcagtgatgtcacgtgtcccaccaatcctgtatgatccctctgacttgtgacccctggcccccaggtcctgggtgctgaccacccagatgtggccaagcagctcaacaacctggccctgctgtgccagaaccagggcaagtttgaggacgtggagcggcactatgcccgggccctgagcatctatgaggcactgggcgggccccatgaccccaacgtggccaagaccaagaacaacctggtgaggcccctggggctcagagtgggccaagagtggagggtcctgccctggggaggcacccattggttggatacagggtgagcaacgtgagggtgggggggggccccccaggccgggcccttggagcaagtgtcagacacaggagctggctcagcacagaacacggaatcaggaaacgcgtaagtccacggcagccagaggacagccagtgaagcggaagctggcaggcacaggtggcagcagcagacatttattgagctcactgtggccggctcccctcttagcccggtccccacatcgctagttcttatagcgtccctatgaggtgggagctgtcgctccactttgcgtgtgggaagactgaggcaccgaggccatgccaccagcccaaagtacagcagacaggctcagaaacaggaggctgcctgtcctccatccccagggcaggaagtaaggccgagctccaaacccactctgccccagggcaaggctttaggcaggggaaggatacggccaggtcagcacattagaaagtggggccagacgtggtggttcacgcttgtaaccccaacactttgggaggccaaggcaggaggatcacttgaggctaggagttcaagaccagcctgggcaacataccaagacccctgtctctacaaaaaaaaaaaaaaaggcgggactggatgcagtgttgggaactggggtccgaaaagttcccagacactcccttctccgcaggcctcagcctacctgaaacagaacaagtatcaacaagcggaagagctgtacaaagaaatcctccacaaggaggacctacccgcccctctcggtgagcccctagcccctgtctgtcttccctcctggtggcttctctatgtccccatctcagtgtcccccatctttccccctaggtgcccccaacacaggcacagctggtgacgcagaacaggtgaggatgggctgtgcttcggctcctggggtgggcgtggggactgcatgggcctgggggactgagcagcatccccggcccctccccaggcccttcgccgcagcagctcactctccaagatccgtgagtctatcaggcgaggaagtgagaagctggtctcccggctccgaggcgaggcggcggcaggagcagccgggtgagtgttgatcaggtcggcaaagagccctgacatcagcagaatccacagcccaccccacccccacccccatcttgctcaagaaccttccatggctcccatctcccctgtgatacacacagatcaaaccctgtgctggaaaggtccctcgtggaggggggccactcctggattcactcatttcctccctgctgccctctttgcagaatgaagagagccatgtcactcaacacactgaacgtggatgctccaagggctcctgggactcaggtgagggggacatctgggtcaaaaatagaggaggccatgtgggtaggtgcagagatgaggcaaaggcagggcggtcgggccagtggtggagtcagcaggtggtgggttggtgtcagaagagacccaggacaggagcaaagatgggttttacttggggtagaggcgagggggttggatagttggctgccaggctggacctggagctggagggtggatgtaacacttgcccctcacctcccctccaaccatcccctgtgcctgtctccagtttcccagctggcacctggacaaggcccctcggaccctcagcgccagcacccaggacctgagcccccactaacgtccagtgaactgcgctggccgcagcttcttgggaacagtgcaggagggatgggctggtggggtgagagggggtctatcatctcctggcccccccttgcctctgggtacctggtggatagctgccttctcctgcgattaaaggctgtggacgtgacagtgagaaatgtcacctgacttcataagaccttctagcaccaccgccgctgggaaccagggccaggcaagactcaggagtcaccaggaaccgtttatggccccacccgccccactcagagctgctgagcaatctgctctatcctcttcagcgtctcctctgattctagctgctccaggctgagcagggacaggcccagctgatcctcctgcagagaacagaggaaagggagaggggggcactgttgggcaggggcccaggcagctgctgcacttccccaaccacccccccgaatggccagtagggacaggatgtttgaatgaatttggagatgtccgtataatccagagcgggccatccctgtcaacataagatggggctgagggaggagccagctagggagtcggagaaggaccggctttctccaggccagcaccgtctctcctgaaaacgcccaatgcctcctcaccccaacttctctcaccctgccgtgcctgggccacctgctggcatctgtggcccctcgaatctcccccttccccccagagcctggcacgtagatgcacgataaacttctctttgctgagggcaggaggacaggcaggctgagggtggggagtggggagaatccaaggggactttctggaggagaagctcagcctgggagggtgccgggagggggacgcaggcctcacccggtggaagggctgtgccatctgccgcaggaagtacttggccacctggacaccctcgtccacggtcaggttgaggttggcatctgtgaggtgctcctggatccagcggggcagcttcccccgcttgtccccacgggcaaaccgctgtgggcagaagcgcaggccagggacagaaggtcattcggggagcctgggccactctccaccctgcaacccaccccacctgggaaatgaacgggaaacagcctggttcttggagcctgggatgggagcacaggggcacccctgaagctgcaccttgtcggcaaagaccatgaggccgtagtccgtcttgcccctgatggcccgacccacacactgggccgcgtggcgcatggcatcgaaggtaagaaagtcattctcacgaatctggaactggtcccgcaggtattccagccgcgcctgcagatacggaggatgagaagctggggaggtgggggagccactcctcccttgatcctaacactgtgggactccctgggagacagagctactcaccttgagaatgcggctctgtgtgtagacgtaggggacgccaaacatgatgacggcccgcccgtagtggtgcactggtgggcagaggagagggggcgaggggggttacaagtgtggctggtgggacagggacagcctcacgcgacccaggatgctgtgtctgagttggggggagagggtgtgttcccgccgggtgcctagggacagaggggaggggagggcccctctgtgcacctaggctgggggtgggtggttccccgcgggagcagacagcagagcgggcaggtgttccagagagctctgggaagacacctggggaggaagagcccagtccactcaccaaagtcgattccctcggacactttgccccgggccactgacagcaggatggccccgcggccattctcgcaggcctgaggtggggagaccgagacgcaagttaggtcactcctcagagccacctccccgacccctctccacgctggcctcgcacacccacctcctggtacttctccagggcgacactggtttcggcaccatcctgggtctcaataaagagcagcttgttcctctggatgttctcaaggatcccctggggaaggacccagggaggtcagggtgggttcagggcacagccatcctggttacatccaactcttctggggactcccacatcaccatgtctctgggcctcagctggctcatctgagatgtggtgagggagggtggaattgtccaacctcagttctttggggaaacagtgatctgggtggggaaccaatcattgctggataagtggggcaggcatgtggcccaagcgggtggccaatcagggcaccccaacccctgccagcgattggtggaggggctgactgtgaggcaggcagagccaatcagaggctgccctgagacttcccatatgacactacaatagagacagtgtggagccaatgcaaggacagaccactgggacagaatggagagtccagaaacacacagccacctgtgcagttcagtggggagagcttttactggagcaagtggattttcaaatggaaccaaaaaatgaaccttgaccccctacttcacaccacatagaaagatgaatttgaggtacctcatagacctggatgtgaaagctaaaaccacaagctcctagaaggaaacaaaggagcctctctctatgaccttggggtaggcaaaggtgtcttaagtaggacacaaaaggcacctgcgctgtggggactgggtcacctttcccgccgcgtggaagccgcctattgaagcacaaggccgatgtcctggctgtgaggatgacgttcccgcctcccatgcgtgcctttccaatacctggattagccaagttcactcacctcaccccaaagtgctttcacccactcctgagagcccggccatggtgtgctcagaggcacaaagtgcagagtggcctcccctcccacccatgtcctgctggtcacccagggcctggctgtggtgagccctgtttccagaatgccccacgacctcctctagctgcttccctgaaggggctcctgcagacccttgagaggctcgccccgagtcttggtccagccttaattctctagaattcctctaacccagctagagccacgcctgctatctgggcctccccaccaggccatctgtgctggaggataacagggatgggtaaccccaaaagcagcagagaagcaaggaacctagaacgtgggggtgactctgccacagggtactcctctgagggaggggcccacattggggcttatatctgcattctcagcctgatgtactgggggcggggcatgggggtgtgtgctgcttacaccccattcctacatgctgcacacactctcctgtcacacaggaaacctgtcaccatcagagtgtgagaggaatgaagctgacatagcggtgcagtgccagggactgaggagagcaggtgcagggagggggtggccaggcgtacctgctcataccaggaggccacggtgctctccatgtactggtagctggtgaagaaggccacgatgccatcagggaccacagcggacatctccagcaggaggttcccatagttccggatcacagctgcaaggggtcagaggttgggccctctcctggcccaggtcctcctcccttctctgtcttagaactaggagtttctggaaaccccactgaggctgcctgtcaggcttttcacacatatccccctcctcctcctcccgggcgtgtctgaggacccgccttgccacttcctgaagtcacacctggc[152 bp omitted]ctctactaaaaatacaaaaattagcccagcgtggcggcagaggcctgtaatcccagctactcgggaggctgaggcatgagaatcgcttgaacccgcaaggcagagactgcagtgagccgagatcatgccactgcactccagcctaggcaacagagcaagactctgtctcaaaaaaaggccatgtgtcacttccaggggagcacccttaggaaccagtgcacaatacactgtgaccactgtgatcccacctgtcacattatgctgcctctgacacacccagcggtggaggttcccaggtgaggagacacagggcaggcccctaccagctcacagtggacgtgtaccacgggcaagaaggaaactctgggctgagcaactaaggccagggatatttgttacagcagcatgactcagcccacctgactgatacacctcccctcttggaacccacagaaaccagccccactggcagcataccaatatcctcccgggtctcaaatttggagctgatggccacctggtcattgccacggccgatgatctggagagcaacagaggtcacgataagcgaggcagcagcaactgctccagcgtgagtgctgaccacctgctggtgctgttctaagctttttttttttttttttttaaagagagacagggtgtcaccatgttgcccaggctgatcttgaacacctggcctcaagtgaccatcccgccttggcctcccagagtgctgggattacaagcatgagccaccacacccagtctgctctaaactttttataaacacagtgtcattgaatgaaccctcagcaaccctgttatctgcattgcacaaatgacctgggctcagagaaggtgagttgcctgcccaaggtcacacagcaaacaggtggcaaagatggaaccggacccgagtctgtccacactctccaacagcagctacactctagccagccccaggccctgggccagccggatcccgaagaacacccctcgccatgccggcgggcatcccaccagccggcaacctcacacaaccaccatgcagtgggggtcattaccggtccacaacctctgacaggcaactccaaaagccaaaagctctgaacacatttctttttcaagtttggcacaaactcatgaagcagcaaaacctgccctgccccgagtctctccagaggcctgacttactccttagtgtgatgcttcccaatcttttactgccgaaatgggagtttgactcgggggagctgcccagaccccactgtgggcatcacacaccacacagcataggccttgtctctaaaggctggaaaattctgaattccaaaacaaatggctgcgcgcagtggcttacacctgtaatcccagcacttcgggaggaccaggcgggcggatcacttgaggtcaggagtttcagaccagcctggccaacgtggtgaaaccccgtctctactaaaattacaaaaattagctgggcatcgtggcacatgcctgtaccagctactcaggaggctgaagcatcagaatcacctgaatccaggaggcggaggttgcagtgagctgagatccgtgccactgcactccagcctgggcaacagagcaagactccgtcgcacaacaaaaacaaaaaaccacatccagcctggggacttcagataagggactgagggctcatgttgacatgcacgtgttacagagacggagacggagaggaaggctcacttacctgggtcacagccagaccacgtactcggcaagatgctaagatgctgactaagcgcctacctgtgccaggccctgggcgacctaagtggtttaccccagttctctctctcaatcctctcaaccaccctgggagatcagggaggatacattcccatttcacagatgagaaaactgaggcttgagagtcgagcccacagagaagcagaatcaagcctaagtctgtctgaatcccgaacccagcctcttcgctgtaaagctctcctgcctgagcagtgggggaagccaaggaaggagggcggccccttgcccccatctcccctcccggccccagccctagcctctcccactcaccatagggcagaggcagacccgtgccagcgtcatggtgaaggttgccatggtgacggggtggaagtccaggatcttggggtagatgtccagcggggacagtgtctgtggcgggacagtgggagggatctcagcaggactgggcagggaccaggaggcccatggagggaggtcagggactaggaggggacggggaagggtccttaccccagatgtgatgatgacagactggaaacgctcaaatacgggtttgatggccagcgaggcgtccatgcagctggagagagatgagggcagtgagggcccggggggctgggcccccgacccacagagcattcacaccctcaccgggcagggtcccacctgaagtgcaggatggggttggcaatggtcggggttctgtcgtcaaagggctcgatgatgatggtgaagcctgcagagggcaggcaaggaggggtgagattaccccactacagccacagctgcacccactcagtcattccctctcctgctccctcgcttcaccccaatctccaccccgtactgcctgggagtaaatgcgaccaaacatgactgcttaagccccaaaccaggcatctgagtccaaaatacaccccaacctgtccgcttcgggcccacacctgtgcaaactttcacgaaggatcccaagtagagagcccacagccccgcccactgctcactctcccagcaccgcatgggctgcccagcacccacgccaaagccaggagccagagcctcaagctttctcccatgaccttttcttgtttttgttttttgagatggagcctcgcgctgtcgcccaggctagagtgcagtggcatgatctcggctcactgcaagctcagcctcctgggttcaagtgattgattctcctgcctcagcctcttgagtagctgggattatagggacacccccctacaacacacccagctaatttctacatttttagtagagatgggggacctgcagtggtccacccgcctcaggctcccaaagtgccaggattacaagtatgagccactgcacctggcctcccacgacctttctacctaagccatcagcaaagccgggcagctctgcctccaaaacctacctgcaattcgcccactgcccccgaccccacgcggggccagccaccatcacctcctgcctggacccatcatcccctgctcgcttcacggcagccagagggaccctagggaaacctgagtccctgagtccagccatgtcacctccccgccccaagaagcctcccatggcccccacatgcctccagtggcctggtgcctgaccttcaaaaatcagcaggctcagtccccccagggcctttatacttgctggtcccatgtggcctggaaaacctcccaaggctgctccatttggtcatctgagactgctcaaaagtcagcccctccgagaggccctccccagccaccttttctacgcagacatattccaacacaacaatgtattttttttcatgataactgtcactttctggaattatttccttgtttatttggctgcatctttgctactggttttcccatctggaatataagttctggggggttagggatgagatcttttttggttcctgctgcttccacagtgctgagcctggcctgtttgttgaagaaataaatgaatgaatgaatttacatattcggtttcacacagtgaaaaaaaatcaagtcctctgtgctggggacacagtggtgaccaagccagccttgcccctgctcgcatgggttcgcagtccagtaggagacagacttgtcctcagatagtgatgactgagagtgggcagtgctgggacagaggtgcccagaggaggggcctgactcagcctgggggtcagggagggcttcctggaggacaagacatctctactaagctgagaacctaaggatgagggggaggtggttgggggatgaggaagatgaggaaggatgatccaggtgaaagaccatgaggtgttggcagatgggaaatagtgggtagagaatgacaaaggtagggatggaagatggggcaggacagagagacagaggcagaagcagcagccagccggcctcgctacccagccccagggcaagggcccagatctccatcctcctgtcaggccctgccgcaggacatgaggcccgatctggtttcctgggtacaggagaaacccccaggaggcagactgagcccctggtcagcttcacgctgaggatggggagggaacaccggcccataaagcctccagaatgatgtccctctctcgtaacctgaaaatctgaacatcagcctctactcctcttgtccctggtcccaaaacccaggcaccacgctccccatatcccagcctctctacctcccacatctctctccaaaccatacctttctctctccccatggccacatcctggccaaggcccctcccctcctgctcaggtccctgcctgccacccagtctcctgcctctagtccctgccagaagaactctttttttttttttgagacagactctcattttcacccaggctggagtgcagctggtgtgatctcggctcactgcaacctccgcctcccgggttcaagcaattctcctgtctc[134 bp omitted]cagcctcccaaagtgctgggattacagacatgag[132 bp omitted]tgcctcagcctcctgagcagctgggactacaggcgcccgccaccacgcccagctaactttttttgtatttttagtagagacggagtttcaccatgttagccaggatggtcttgatctcctgacctcgagatccgcccgcctcggcctcccaaagtactgggattacaggcgtaaaccaccacgcccggccttttttttttttttgagacgaagtcttgctctgttgcccaggctggagtgcagtgccacaatcttggctcactgtaacctctgcctcctgggctcaagcaattctcctgcctcagcctctcaagtagctgggattacaggagcccaccatcacacctggcaaattgttgtatttttagtagagacagggtttcaccatgttggtcaggctggtctcaaactcctgacctcaagtgatctgcccacctcggccccccaaactgctgggattatgggcgtgagccaccatgtctggccccagctaatttttgtatttttagtaaagatggggtttcgccatgttcaccaggccagtctcgaactcctgacctcaggtcatctgcctgcctaaccattccaaagtgctgggattacaggcatgagccactgc[143 bp omitted]aaccccacctctactaaaaatacaaaaattagctgggtatagtggcatgcgcctgtagtcccagatactcgggaggctgaggcaggagaattgcttgaacccaggaggcagaggctgcagtgagccaagatcacaccactgcactccagcctggcaacagagcaagactccgtctcaaaaaaaaaaaaaaaagcacaaatctgacctggcaccttgcttgctagaatctgccatggctccccagtgccctcaggagcacaaagatcaactcattaccgtgccctctagtgtgagctgaccccatagaatttctctggcctcctcccttaccactgcccatgccatccttctccactctgcagcccgaggaagtctgtgaaaatgtaaatctgagcacaaggcttactcaagaactatgtatggctccccactgccttcaaaatagggcccacacttccaagccaaaccccacaaagccctgtgtgtcctgccaacaaccctctagaccctgctgggaccctgattccagctgctaggaggcccagcagggacagaaaaaggtgagcttacctttggcgtaggtgctgacaagggtggcaaagttagcaaggagggtgagcggggagaagtcagcaaggtcggtgatctccagagtatgcagcagggaccggaggcgttcagcacagaatctggcggggaggagagacggggtcggggggcagacggaagcatgagcaggaccagcagccctgcctccgccatcacgacggtcacgtgcctgtctccccagccaatgagcactcagtgagggtgggcactgggcctgttttggaaacttgcacccccacgctgtacacctgcatgtcacaaatagccattgccgcataatggcacagacagagcaataatcagacactccagagtcatgtggtcacttgtcacacctgctagcacgacctcctaagtgggttctttttttctttttcttttttttctttgttcagatggagtcttgccctgtcatccaggctggagagcactggtaccatctcgactccgcctcctgggttcaaatgattctcctgcctcagcctcccaagtagctgggattacaggtgcctgccaccacactcagctaatttttgtacttttagtagagacggactttcactatgttggccaggctggtcttgaacttctgacctcgtgatccacctgcctcagcctcccaaagtgctgggatgacaggtgtgagccactgcacctggccctaagtgggttctgatcaaaacaagagacgcacaatcacacccagaaccccccagtcatggcattaatcccgcatggccacatggtcacgcattcacacccagagcctctcccactgcctctcacgcacctatggggacacacacggtgtcggaaccccatgggctcacagaggaatgcagtcaacacccacatcccacagagtcccacggataccacgtccacacactcacgcatgtgcagggccactcggccacaaccacacacaggcagggccgaggcagggtcatagagcagctggctttgaagccaggtgggcagtcacacttgcaaacctgcctcccgcacgtcagccctcccagcctggctcctctaaccccaggcgcctaccccggctggtcgctagctgaggatgagtctgtcccctccactgggccatggagcctctacggctgtgtccccagcatgaagcaggcacttggggaatgtgtgttgagtgactgagatcccctctttgccctcacaagtctccaatcctggggaagatgggcaaacccacatggaaggtggcctcacccacagaggcagggcagccagggcctttggagcccacaggcatggcttcaagccccaactaccgggcacagtgctgtgtggctctgggcaaaggcttcccctctgggagtcccagtgtcctcatttgcagggtggggatgctgtactgggggtgcaactgaggtaaggaacataaagggcttagctcctccttagtgctcagggcagggtaggtgattggcttcgctgctctctcattaacccaccaaagaaccctgtgaagtaaagacccgactccttggccattttacaaaggaggaaactgcagttcaaagaagacccatgacttacccaaaggaaaagccccctcgtatcccttggtcattctctgcctgccctgtgcctcaagagactgactcccccaaaatgcgcccagactactccatggggacgcccctgccctcaggtttggaagattagaggcatcggtgggaagatacatgggccggggacacctcctccagctcccagcctgcgaggccctggtactggtttctgctcccagcagaagcccctgtccaggcccccaccagttggttctcaacacactccctccctgccgctgtggcctggcttagctcccagctctcacctcccaccctccttggctcctcccccagcccgcccctctgtaaatggtgctcccactctctcttgggtgggggagattctccaatccagccaggtgttgcctgccaggcccctgcccgacgcacggacccaggatcagctccaaccttgctcccggacctcccaggtcagaccagacaaggtcccacgtgcctcgcccagctcactcactcctgatgctgcagtggtgacctggggctacaggcgtggaggacacggctctgcataaccgggacctgccgggcccccaccccgcgcgctgtctggggccgcacctgaggggcttgcgctggatgcacacgcgctgggccaggccgctcaggaaggcgggcgggctctcctgcaccacatgctgcacacgcagccgccacttcacgtactccagcagccgcctcaggaagcccaggaaatgctcggccgtgcggatggagccaggcactgcctctgcgaggagacgctatcagcggcgacggggaggcgggaaagggactggggggcagcggggggtcggggctcaccctgcagcacttcgtcgggcagcacggggttggccaggtgggcgtccgtctcccgggcggcgctggcctcccgcagcccctccaccagacgccggtactcgtcccgcaggcgctgctcgtctgtctctttgatcctgcggagagatgagctggggctgggagggggctggcaaccctggggacaagtcagacaggggccagggtcccaggggcagggcgggcaccaccgccagacgtccccggccccacctgagcaccgtcttctgcagggtctccaggttgccctggcaccggtcaagggtccggcgggtgaggttgacgctcatggagtcgatgcagacgttgtctggagaagggggagagagccggctcaggcaggcctgcaggggcctcactcagaggggctggcatccctttggcccctggcgcccccctcaccaatgttgtgggcctcgtcgaagaccacgacggccttgcgggccagttccttggacaccaggtctgcaatcttggggtccaggaggtagtggtagctataaaccaccacattggcatgcaggatctggggggccggggagcagggttaccagggccctgccaccccaacccctacccctacccctggccacactggcccgtcactcccacacaggcctgcacaggcagacacaggccaggcagaagtatgagcagatggatagagacagaccaacagatacgggcacccaccaacagggagatgcagacaggcagactcacagcaagcaacagacagacatgggcagacaggagacgggcgggcagcccacaccctcacactcgcccctctgcccatcccaccagcctcctcactgagtatcgagcaaggaagtatgggcaccagccctggcgccgccccagggccttcaggtcatccaggttgtagatgccagcggggaggggcacctcacgcccatgggcatcaaattcctgggacaagagtgccaggggtcagggaggctgcctgccccaggctacctgtcctgcctccctccctcagccctgccctccagtaacctcatagaatcggcagtggggcaggctggtgtcatgctggtactgcgcccgcacataggaggctgtgaggctgtggcatttcccatcgacgtccttcccaaagcgcaggggtgtcacctgggggtgtggggcatcttagcacccagacagggtggaaacccaaccactcttcaaaccctggtctccacacctcccagctggctggggttttggacaacttgaacctcagtctgttgcattattagttaaga[133 bp omitted]ccaacatggtgaaaccctgtctccactaaaaatacattagccaggcgtggtggcacatgcctgtaatcccagttactcgggaggctgaggcaggagaatcgcttgtatccgggaggtggaggttgcagtgagcagagatcgtgccatagcactccagcctgggcgacagagtgagacaccatctcaaaaaaataagtaaaaataaaaatacaaaaatgagccaggtgtggtggtgcacacctggaatcccagctactcgggaggctgaggcaggagaatcccttgaacccagaaggcagaggttgcagtgagccgagatcatgccactgtactccaccctgggccacggagccagactccctctcaaaaaaaaaaagagtagcaaaattgttacattcttacaactacaagttatacatacatatttttggagacaagtccctctgctactcaggctggaatgcagtggcccaatcacggctcactacatccttgacctcccaggctcaagtgatccttcccccactcagcctcccgagtagctgcggccacaggtgtgcaccaccatgcccggctaatttttgtcttcttagttgagatgaggtcttgctatgttgcccaggctggtctcaaactcctggtctcaagcaatcctcccacctcagcctcccaaagtgctgggattacaggctgagccactgcgcccagccagccaaaactaatattttattttttgagacggagtcttgctctgttgcccaggctggagtgcaatggcacgatcttggctcaccacaacctccgcctcccaggttcaagcgattctcctgtctcagcctcccgagtagctgggattacagacatgtgccaccacacccggctaattttgtctttttagtaga[139 bp omitted]gcctgaaaaatctttagcatataggttgaagataactacttcatccttggaaatgccaaaacgcatggaaccttggcagggcctaagaatcaaaggaggttccacacagtctgggactccccttacccctgacctgctctgtaccctctaaggcaccatcacagcctaaggctttttctgaagaacaaatccttttcctacgccaaaaggaaagctccaaggcagccagcccttccttctccatttcccctttcatcagtcaccgaggcctgtgctctttgtcatccactagatgtattatttctcacatattcttacaaataatgtgatataatatatagtctgtgggcccagtgtgggagtttgagaccagcccggccaacatgatgaaaccccatctctactaaaaatacaaaaaactagcagggcgtggtggtgggtgcctgtaatcccagctactcaggaagctgaggcagaagaatcacttgaacctcggaggtggaggttgtggtgaaccgagatcacgccactgcactccagcctgggcaacaagagtgaaactccatttcaaaaataataataataaataaggctgggcacgatggctcatgcctgtaatcccagcactttgggaggctgaggcgggaggatcacaaggtcgggagttagagaccagcctaaccaacatggtgaaacaccgtctctactaaaaacacacaaattagccgggtgtagtggggcacctgtaatcctagctactcaggaggctgaggcaggagaattgcttgaacccgggaggcggagcttgtagtaagccaagatcactcccctgcactccaggctgggtgacagagtgagactccgtctcaaaaacaaaacaaaacaaaaatatatatatatatacacacacacacacacacacacacacacacacatataaaaacatatatacacacacatatatatgtaagtataatatatacacatatatacattctgtgggttaccacatgtaaagtattcagaacagtgcctggcacacagtgagtacaatttttttttttttttgagacggagtttcactcttgttgcccaggctggagtgcagtggcgcgatctcggctcactgcaacctccccctcgggagttcgagcaattctcctgtctcagcctcccaagtagctgggattacaggcatgtgcccagctaatttttcaattttttttcagtagagac[135 bp omitted]ttaatgataactaatattgtatttgtcatatatcattatgcatataaatatcatgacaatttctttttttttttttttaagacagagtctcactctgtcacccaggctggaatgcagtggcatgacctcagctcactgcaacctctgcctcctgggtacaagcgattggcattaccgacgtgtacaccaccacccccggctaatttttgtatttttagtagaaatggggtttcgccgtgttggccaggatggtctcgaactcctgacctcaaatgatctgcccacctcagactcccaaagtgctgggactacaagcgtgaaccactgcacctggcctatcatgagaatttctaacattcttttagctctttgtacatgctaagggcatcggctgcaacatttcacccaattttatcatcagcaaccttatgaagcaggtacataattatccccattttacagaaaggaagactgaggcccaggtggcagaaaatgcctctccataaatactgggctagtaagtttcagagccaggaaaccaggcttgccagagactctaagagctgcctttttaacctctcctaggcctgggtagaatttgaagactccctggaggaagtgtgcttgcctgggccacgatgaatgagaatttgaccactgagacgggaattctgtgtgtagccactgcatgcctttgcaagagatatggcctggggatccaggacttgtggttggacgaaagagttttctctacctctgggctaagggcaaggagaaggaacaggtgctcacctcagggtgaatacacaagtttttgcgggagctcagagccagtcccagaaacggcagcttctcgccctcctgcttctcatagaagttgagcaactttcgaagctcttcaatcacctactccaaagttggggggcagggggagcttgtgctcattggaggcacaaacccctgccctgccaggtcccagtctcttccccagcttcccaaacacccccgaaagctggtgacggccaccgccagggggaccaatagggcctagggaacagtggggctggagcaccaggatgagtcccagcttaccttctcaatctctggcacagttcttgagcagtagatgagtttggtcacctccagcggatatgcctgccgataacaagcggactcagtccctgtcccgccccttcctttgtctgcctttacgggttcagcgcatcactcactctctggtatgccatgatcagggccaacagggatactgtcttcccggtgcctgagggcatctccaggactccatgaccctgcatgttggggaccagaggggcaacacacagggtctcagaaccttgggcacacaaactctggggactctccccgacccccaatgccaccaactcagaacagcaggataacacagcagcagttaagattgggcagtgggtttgaacctcacttctgcctcctccttgttgagtggtcttaggcaagtaccttcacctccccagacctcagtatccctatctctaaaatgagcctaaagccaggcgtggtggctcacacctgtaatcccagcactttgggaggctga[134 bp omitted]aataaaataaaatgggcctaataataaaaccttcctcataacatgactatgaggattgtgagaaattgcaggttaaatatttggcacagtagctgatatatagtgaacttttctcccttcttttttaagagacaagtgtcactattgcccaggctggaatgcagtggcacaatcatggctcactgcagcctccaactcctggcctcaagcgatcctcctgcctcagcctcccgagtaggtgggattacaggcgcccgccaccacacctggctaatttttgtatttttagtacagacggggtttcaccgtgttggccaggctggtctccaactcctgacctcaagtgatccgcccgcctcgtcctcccaaagctctgggattacaggcgcgagccaccgcgcccagcctattcaccattattgttttagataacggaagattatggggtcctggattcccagggacctcggacttctaaaatccagacgtcctgcaatctgtcttaggcccaggcgtggcagccccaccggtcgagtgggcgggtcgggcccaccggccacccaccttggcgtccagcgtgcgtttgagctcccgcatgtaggagaactgctcggggtagatgtagtcgtacgggaagtagaccaggagcccgtccacgttgagcctggcggcaggggctgctgggtcagttcccgtcccctcagcccctctcccgcctccacagtgcccggtcgtcgagcccagagaagggtgacgggcccggcgcccccggtaaccctcaggtcctcaggagcctcggggccccctcagtgtctcctcgctatcactgctgctccctgcggctgcccccgtcccaccccttcaccctcccctcgcccccttggggacccaggcgcgcccaccgatgaccccatcttcaagaccccccgcgcccgctagcgagcgcgacccccagcccccttctcacttcatggcgccggccggactgtgcagcggggtcgacccgcctccctcatgaatattcagcgagaggccgggtcgtggacatcctcgagggctcgctccacctatattacgagaccattggctaacctgcccgtcaatccgctagggcagagccaatcgggatactgcgcgtgcgcacggaaaagcgagggcggctgactctcgggtgaggcggtgcgggaggcgtcactgaggatcgtcgagggccaatcaaaaagaaaacatggaagggaaagagccgagagactcgatctcattcactagaatttggtcctcctgcgcctgccaagattgtctgagtattgatcgaacccaggagttcgagatcagcttgagcaagatagcgagaacccccgcccctccacctcgtctcaaaaaaaaaaaaaaatcgtctcagtagcgaatagtctaacggagaatgacagggaaattggtgatcctttctgggcccaagagttagaaatggctttgcaggccgggcgcggtggctcaagcctgtaatcccagcactttgggaggctgaggcaggtggatcacctgaggtcgggagttcaagaccagcctgaccaacatggagaaaacctgtctctactaaagatacaaaattagccgggcgtgctggcaaatgcttgtaatcccagctactcgggaggctgaagcaggagaattgcttgaacctgggaggcagaggttgcagtgagcagagatggcgccgtcgcactctagcctgggcaacaaaagcgaaactccatttcaaatattaataataataactaataaataaaacataaatgctagcttttgtttgtttcttcaacaaatagctatgtggcatctaccatgtgtctgatcctgtgctggcccctgggaacagaaaggtgaccatgacagcctcagcacctgccctcaaagaacagatttttttccttgagacagggtctttctctgtcgccaaggctggagtgcagtggcacagtcacagctcactgcagcctccacctcttgggctcaagcgatcctcccacctcagcttccagagtagctgggaccacaggtgtgcaccaccaagcccagctaagttttattttttaaatttttttagagacgaggtctcaccacgttgcccaggctggttaaactcgcaggttcaagtgatcctctcccctcagcctttcaaattgttgggattacaggggtgaggcaccaggcctggcctcaaagaacagatattaaatatacaaatgaatatatgattacagcctggagtggtggctcgtgcctgtggttccaacactttggaaggccaaggcgagtacattgcttgagctcaggagctagagaccagcctgggcaacatggtgaaaacccgtctctacaaaaaatgcaaaaattagctgggcgtggtggcgtgcacctgtagtcccagatactcaggaggctgaggtgggagaatcacctgggcctgggaggcagaggttgcaatgggcagtgattgtgccactgcactccagcctgggcaacaggagtgaaaacctatctcaaatgtgtgtgtgtgtgtgtgtgtgtgtgtgtgtgcgcacgtgtataatcacaagtacaaaagtgctgtgaaggaaaacttcaagtcaccataaagattgattatgggctgggtgcagtggctcatgcctgtaatcccagcactttgggaggccaaggcagatggatcacgaggtcaggagttcaagaccagcctggtcaacatggtgaaaccctatctctactaaaaaaaaaaaaaaaaaaaaaaaagccaggcatagtggcatgcatctgtaatcccatctactcgggaggctaaagcaggagaattgcttgaacccaggaggcagaagtgagccaagatcacgccactgcactccagcctgcgtgacagagcaagactccgtcccagaaaaagaaaaaaaaaaaagacttattatgacaggatgtctactgtcaactgtggggtgtgagtgttggccaagtgatcagagaaggcttcgtggaagaagcgaggtttgagtagagccagaaaataattagaagagatcaaccagcaagaggggatggatgagagaagtgagaaaggtgttccagggagagagaccatcatacacaaaagctctaggccagaagaaagctgaggcctgtgagtgctgaaaggaagcctgtgggggtggagctctgagttgagcacagggagcagagaaagggcagctggaggggaaggcaggggcagatcgaaatctcttttttaaattaattaattcttaatttatttatttttgagacaaggtctcactctttcgcccagactggagtacagtggcacaatctcagcgcaccgcaacctctgccacccaggctcaagcaattctctggcctcagcctccctagtagctgggattacaggtgcgcaccactactgcccagctaatttttatacttttagtagaaacggggtttcactatgttggccaggctggcctcaaactcctgacctcaaaagatccacccacttcagcctcccaaagtgctgggattacaggtgtgagccacccttcccggctgtatttttggagacagagtcttgctctgtcccagcctggagtatggtggtgtgaatttggctcattgccaccttgacctccagggctcaagtgatcctcccacctcagcctcctgagtagctgggactgcgggtacacgacaccacgcctggttaattttttttaattttttgtagagacgagggtatctcactatgttgtccaggctggttgaactcctgagctcaagcaattctcccacctcagcctcccaaagtggtgggattacagacgtgagccactgtgcccggcttaatttatttacataaatttttttatgtttacttttctatctcctacaggaagaaaatatattttgttattgacagggtctcgctatgttgcccaggctggtattgggctcaagccatcctgttccctcagcctcccaaagtactgggattacaagcgtgagcctctgcatccagcccagatccaaaatctttactgtcacctacagagtcctctgtaactagcttactgctcatcatccccataccaacccaccttactgctctgatctcctcctctctctcccccagctcattttgtttcagctatgctggtctccttgctgtctctaaaacataacaagcacatcccatctcagggcctttgcaccagctattttgtctgcctggaatgctgtttcccctgatagccatgtggctgacacactcacctccctcagctctttgctcaattgtcaacttctcggcccggcatggtggctcacacctgtaatcctaccactttgggaggctgaggtgggcagatcacctgagatcaggagttcgagaccagcctggccaagatggtgaaatcccgtctctactaaaaatacaaaaattggcaaagcatggtagcacataccagtaatcctagctacccgggaggctgaggcaggagaattgctggaacccgggaggcagaggctgcagtgagccaagatcatgccactgtactccagcctgggtgacaaagcaagactctgtctcaaaaaaaaaaaagtctccttctcaatgagggcttcctgaccaccaaattaaatctacctcctagacacacacacacacgcacgcacgcacgcacacacacacacgcacgcacgcacacacacacacacacacacactatatcccctttccctgctttattgttcttgagagctcatttaaccatgtgacatgct[134 bp omitted]cacggtgaaacctcatctctattaaaaatgcaaaaattagctgggtgtggtgtcgcatgcctgtaatcccaactactcagaaggctgaagcaggagaatcgcttgaacctgggaggcagaggttaacgctgagccgagatcgcgccattgcactccagcctgggcaacaagagtgaaactctgtctcgaaaaaaacaaaagtcagctccatggcaggagtgatggctcacgcctataatcccagcactttgtgaggccgaggcgggcggatcacttgaggtcaggagttggagaccagcctggccaacatggtgaaacctcatctctactaaaaatacaaaaattagccgggcgtggtgacacatgtctgtagtcccagctacttgggaggctgaggctggagaatggcttgaacctgggaggtagaggttgcagtaagccaagatcgcgccattgctctccatcctgggcaacagactccgtctcagaaaggaagaaagaaggaaagagagaaagagagaaagagacagagagagagagagaaagggagaaagagagaaaggatggaaggaccctgacaagcactgttgcataaaagtttcttttctctctcttttttttttttttttttttttgagacagggtctcacttctgttgctccagctgaagtgcagtggtgagaacatggctcagtgcagcctcaacttcccaggcttaagtgatcctgccacctcagcctcctgagtagctgggactgtaggtgtgcaccaccgtgcctagctaattttttgtatttttagtagagacatggttccgccacgttgcccaggctggtcttgaactcctgggcttaagggatctgcccgccatggcctcccaaagtgctgggattaccagcgtgagccactgtacccagcctgagtataggtttctgataaattttaggatcatattgtttggactgggtaagaatttccagaactctaatgaagaaactgactggtttatattttattttattttattttattatttttgagatggattttcactcttgttgcccaagctggattgcagtggcacgatcttggctcaccacaacctccgcctcccggtttcaagtgattctcctgcctcagcctccccaggagctgggattacaggcacccaccaccatgctcggctatttttttttttatttttttatttttagtagagacggggtttcaccatgttggccaggctggtctcgaactcctgacctcaggtgatccacctgccttggcctcccaaagcgctgggattacaggcatgagccactgtgcaaggcctaggctggtttataaaattgctaaaccaagcagaacatgaattaaataccaaggaaatactctcctagattgtcatgttacatcagccaatactaaaattgtcaagatacacaatttgaatgaactccatggtccaagtcgaattatctatgatattacccatctaataaacagcactatgtcccttaatgggagaaaaagttggagaatttaagagaatatcaatccaatgttggttgggtgcagtgaatcatgtctatattcccagcactttgggaggccaaggcaggaggatcacttgagcccaggaattcaaggccagcctcggcaacacggtgagatcctgtctctacggaaaattaaaaaaaaaaaaagagagagattagtgggatgtggtgcctatagtcccagctacttgggaggctgaggcgggaggatcatttaagcctgggacgttgaggttgcagtgaaccatgagtgagactcatctcaaaaaaaaaaaaaaaatggcgatcactagaggaaaaaaaaactaaagtggggtttgcgggtagtgggagggcccttcctgctaggttgcactatgatctccagggaggctccacgggagaatcatttccttgtctttttcagtttctagagccaaattctttgcataccttgcattccttggctcggaaccccttccctaaccttcaaagctggcagctagcctctggctcaagtgtcacatggcctgtctctgtcttcctatccaatcttcctcttataagaacattggagccaggcatggtggctgacgcctgtaatcccagcactttgggagaccgaggcaggcggatcacaaggtcaggagttcgagaccagcctggccaacacagtgaaaccccgtctctactaaaaaaatacaaaaaagtagccgggcatggtggcaggtgcctgtaatcccagctacttgagaggctgaggcaggagaatcgcttgaacctgggaggcagaggttgcagtgagacgagatcgtgccactgcactccagcctgggtgacaatgcaagactccatctcaaaaaaaaaaaaaaaaaaagaacactggagaccaggtttagggctcactcagatactccaggattattgtctcattttcagatcctcaaggtcagcacaactgcaacctcccttttaccatataaggtcacattcacagattatgaatttgacaaaccaaaaattggtcataaactatgttagcaatttggaaacagtcatcatagcaatatatttcatttgaatcattatctctctcatgatgaatcacggagtgcagaggtttggttttatttattatttttctttttctttttttttgagacggagtctcgctctgtcacccaggatggagtgcagtggcgcgatctcagctcactgcaacctccacctcctgggttcaagcaattctcctgcctcagcctcctgagtagctgagattacagacgcccaccaccacgcccggctaattttttgtatttttagtagagatggggtttcaccatcttggccaggctggtcttgaactcctgacctcatgatccacctgcctgggcctcccaaagtgttgggattacaggcgtgagctatggctcctg[140 bp omitted]aactccatctctactaaaaatacaaaaaattagccggacgccatggcgggagcctgtagccccagctactcgggaggctgaggcaggagaatggcatgaacccaggaggcggagcttgcagtgagccgagatagtgccaatgcagtccggcctgggcgaaacagcgagactccgtcgcaaaaaaaaaaaaataataataaataataaataaaaataaaaataaaataaaaaaataaaaataataaaataaataaaaattattttgagacaaagtctattctgtggcagaggctggaatgcagtggcgtgatcacagcttactgcagcttctacctcctgagctcaagcgatccttccaccttggcttcctgagtagctgggacctcaggtgtacattaccacgctcagctaattatttatttatttattatatttttgtgacggagtttcgctcttgttgcccgggctggagtgcaatggtgctatctcagctcactgcaacctctgcctcctggattccagtgattctcctgtctc[218 bp omitted]ttgctctgtcacccaggctggagtgcagtagcgtgatctcggtttactgcaacctccatctcccgggttcaagcgattctcctttctcagcctcccaagtagctgggactacaggtgcacaccaccacggcgggctaatttttgtatttttagtagacaccaggtttcaccatattggtcagactggtctcaaactcctgacctcaggtgatccatctgcctcagcctcccaaattgctgggattacaagcgtgagccacacacctggcttaatttttttatttttgatcgacacagggtctccctatgttgtccaagctggcagagatttttgtttgtttgtttgagagggaattttgctcttgtagcccaggctggagtacaatggtgcaatcttggctcaccacaacttccgcctcccgggtttaacagattctcctgcctcagcctcccaagtagctggaactacaggcacctaccaccacaccaggctaatttttgtgctttttagtagagatgaggtttcaccatgttggccaggctggtcttaaactcctggcctccagtgatccacccgccttgacctcccaaagtgctgaaattacaggcgtgagccaccgcgcctggcctctcaacctacaatttcaacacccaaggaaacagcccaccatgagtgagaaccagcagacacaacaaactataggattagctgcctccaaacttcaggtgatagaattatcaggcatgtacttgaaactaaaggacacaaaagaagaatccgaaatataaaataaaggattggacttgtgtgaaaagaatcccttagaaagggctactttcaggctggccatggtggctaatggcctgtaatcccagcactttggaaggccgaggtgtgtggatcacctgaggtcaagagttcaagaccagcctggccaacatggtgaaaccccgtctctactgaaaatacaaaaattagccaggtggggtggcagatgcctgtaatcccagctactcgggaggctgaggcaggagaatcgcttgaactcaggaggcagaggttgcagtgagctgagattgcgctatcgtgccccagcctgggcactagagtgagatcaaaaaaaaaaaaaaaaaaagaagaagaagaagaaagggctactttcagactgccttgccaaaaatcataaccacaatgatgagcatgtattgagtcaaaacagaatcaaaagagaagaaagtcaatttctgtgcaaactacttttatttataaggaaagtttctctattttgtttataaacattaaaccagtgctgtgtgaaggcacttaattggggagaggtggggcagggatcctggtagagaccaatgtttcccacccagaccccaagactgctgggagagatggtgtcagcagtgactcccaggaatatccagtggtgtggtggcccatcccaggcccggctgggcaggtggctggcttgctgggggatgtgatgatggtggtaggcatgggaggcactttggacgggatctgatttggcaaaaggaagtggtttcctgtccccagtgatttccagcccttcccagacctcccaaggctaaggcagattactaaatttaaggctggggccctccttcttccctggacttccaggagaacagagaaccggtggcaaggaccaccaccagcagggtgaggggtgcagataaaggcagcaaaaaacagagggagaggtctggagggaaggcaggaatgcttgtttctgtcagcctcagaaacctccttctatcctgctagactttactcctttgaggcttcaccctggggaacagctggggagagacaggatcttcagacatcaggagctcccacctcctcatcccacatgcaaatccgctgcctgtctctatcctcccaccccttcctaaggggacctctcagcacctcccaaactgctccagaatccaagttctgtgtcacctccaagaaccagatggaaccttccaatcagagcctccactgatgaaatggaatatttccagtgtctcctaactgccataaggagaagcccacctctctctaacaccttggttgtctttttgggtcccacctccatatttaaaaaatctcctctctcagggccgggagcagtgggtcacacctataatcccagcagtttgggaggccgaggtgggtggatgacctgagctcaggagttcaagacaagcctggtcaacatgacgagaccctgtctctactaaaaacacaaaaaattagctgggcgtggtggtgcatgcccgtaatcccagctacttgggaggc[132 bp omitted]gaaaaaaaaaaccaaaataaaaaaatctcccttctcaggaatgtaacggaatcttccttgccttctcccctaaccctaatagagaattttcctcagttacactgtaattttattaatggatttttcctcattctgcccaatgcagtgtaatgaaagcttcctctccatctgttatattatatataaatatatattatatatttatatattatatatttatatataacatatatttttattgtcacccaggctggagtgcagtggcaccatcagggctcactgcaggatcaatctcccaggcttaagcgattctcctgtgtcagcctcctgatgagctgggattacaggcacccgccaccacacccggctaactttttttttttgtatttttagtagagatggagtttcaccatgttggccaggctggtctagaactcctgacctcaggagatccgcccgccttggcctcccaaagtgctgggattacaggtgtgagccacctggccgggccctccacttccttcttgtacattgctgaatccctgtgtcagccctagaggtccagtcttttgccctctcccagccttaatctacaattctgtaacccacccaccatcattaaaatgagattcttctttgtcgcttcccttggctaaaatggattattctttaacctctccaccaatacaaccagggatgataataaaaacattggattgagcagaaaccaatcaaataactagtaaggcagtactggcgagcaccctacatcctgacagctttataaagggcgcttccagccaggtgcggtggcacatgcctgtaatcccaggactttgggaggctgaggcgggcaggtcacctgaggtcaggagttcaagaccagcctggccaacgtgatgaaaccctgtctacacaaaatacaaaaaaaaaaaaaaaattagccgtgcgtggtggcatgcgcctgtcatcccagctactctggaggccaaggagggaggatcacttgagcccgggaggcagaggttgcagtgagcccacatcttatcactgcactccagtctgggtgacaaagcaagactccatctcaaataaataaatacaaattggccgggtgcggtggctcatgcctgtaatcccagcactttgggagacca[134 bp omitted]ggtt[132 bp omitted]aaatttaaaaataaaataaagggcttttcctcacctactccactaactataagggacccttacccccgacattactattaaatataacggacttttcgtctcctccccatgagcaataatgagcttttcagacctccctctcccaatataacggtttgttcctgttgcctcttctttttcctgtgggatcccccttttccccaacccccaactgtcgggaggtccccatgacttctcccctgggctcaccccgaagtagttccgcggcacgtagccctcctggccgtgcagcgcggcccaccaccagtcggtctcctccggcccgtccctccgcagcacggtgaccgactcgccctcgcggaaggacagctcgtccccgaactcggcgctgtagtcccagagagcgtacactgccccgctgttcatcagccccatactctgctcgacgtctgaaacatgccacggaggggaaggtgagagcctggcccagggggtccaggaacaggggccacgtggggtccaggacagaccctggaatttggcgcctgtcccagcaaccacctgaaatgttgtgtgtgcccatggctgtggatgggaaccggagctggagtcagatgccgggactggccgtctttgagcgttcgaggaaactgggggaggcatgccagt[159 bp omitted]tgcctcagcctcccgagtagctgggactacaggcgcccgccaccacgcctggctaatttttggtatttttagtagagtcagggtttcacc[140 bp omitted]gtcgcccaggcaggagtgcaatggtgcggtctcactgcaacctccgcctccggagttcgagccattctcctgcctcagccttccaagtagctgggattacaggtgtgcgccaccatgcctggccaatttttgtatctttagtaga[154 bp omitted]cctagaggtccagtcttttgccctaccctggcgcttagcttaagtggtacagtctctaaggaagattcgcaccttccttgaatgatagggtcctttaagttggctcat[135 bp omitted]cagcctccaaagtagctgggactacaggcccacgccgctacacccggctaaattgttttatatttttaatagagacggggtttcaccgtgttgcccaggctggtttggaaatcctgagctcatgcaatccgcccgcctcgagcctcccaaagtgctaggattacaggcatgagccaccgcgcctggctttctttttcttttcttttctttttttttttcagacaaggtctcactctgccacccaggctgcgggagtgcagtggtgagatcaagcttactgcagcctcgaacttccagattcaagcaatcctcctgcctcagcctcctcctgattctttatgttattattaaatattttgtaggccgggcacagtggctcacacctataatcacagcactttgggaggccaaggca[132 bp omitted]ctcgggagcctgaggcaggagaatcgctttcaccgaggaggcagaggttgtagtgggctatggtgccattgcactccagcctgggtgacagagcaagactctgtctcaaaaaataaataaataaaaataaataaatatttcgtagaggtcaggtgtggtggctcacacctgaatcttagcactttgggaggccaaggtgggcagattgcctgagctcaagagttcgggaccagcctgggcaacactgcaaaaccccttctgtactaaaaatacaaaaaaatgagtcgggcatggtggtgagcacctgtagtcccagctactcaagaggctgaggcagagaattgcttgaatccaggaggtggaggttgcagtgagccgagattgagccactgcactccagcctgggtgacagtgagactctgtctcaaaaataataataaataaatatttgtagagacagggggtctctacaatgtcttgtagcctgaccaggctcacctttcaaatatataaccctctgtctcacccataagtcctaggacctgcctcactccaactctccgtgaagttccttgcccacaccgagatacaactggctcctccaggtgtgaaatgaccctgtgcacaatccccgtggcacagcctacttcgccctgcccgtcggggaaccaggtgatgtagcctgccccctggagagatagggtacagccttgtgtcttcctacaagcccctttctggcagctgtagcctgctcacctgccagtggtgtggcaatgcctctcccacaagtggcagagcccacctgcccagagccctatgccaggtagatggcagggttgaaacgttcagctcctcacccttgaagatgtgaaaggtgagcagaccaatcttcacagccactctcctccccaaaggtgtccagctcgcatagcacagcctccatgtccccttttcccttaggagggcatagtccccccacccccgcaagcggtccatccctcatcctcctcctcggcaatcctgccaagtggttggtacagcccccatacccttctctccctagtagggggtagttgctcccctccccgctcctgcgcacccgccaggtacccaggcgccagcagccctgcctcgcacctgccaggtaggtggcgcagtcagcataaccctcgcggtaagggtcgcacttctcgaaggcggtggcgccgtcgctgagcgtggtggcgaagattgcagcgccgtgctgcaccagcgccatgcagatgactgtgtcgttgcacgacgccgcgcagtgcaagggtgtcctaggcgtgggggtggggggttgcggggaacgatgcgtgagaggctgcgcgtccgcccacgggggacccagcccaccgcgcgggtcggggctcaccagccgtggctgtcgggggagttgacattggcacccgcggtgatgaggaaatccacgatagagtagttggcgccgcagatggcgttgtgcaaggcagtgatgccctcctcgttgggctggctcgggtcgttcatctgagtgcaccgggggagggggaagactcagtcccgcggctggcatctgcgatgcccccgccgtgcccacctcccgctcagcagcgctcacctccttcaccgcctgctgcaccacctccagctccccggtcagcgccgcgtccaggaggagcaccagagggttgaggcgcgcgcggcgggccttgcgcggggagcccgccttccgcagcacagagcgcatctcctgggggacagggcgcagaggtcagcgacttggagggattgttagtatatccatgatctagagtaggaaacagaggtccagggacttgtggcacccatctagacaggggtagaactgggattccctcgggatggggtgagggggtgccttcgatctcctcctagagcctccagttccctgccatagacagggaatcctgtgatttgagaatcttgggccctgaaacttgggagaaagctggggggccatgggattggtggcaaagtaattctatcagttcaaaacaatgattgtggaagccagttatgcaattcacacacagtctcacatttcttttgttaataatgaatgcaatgagacacacatgacaaaatgttaccaggagtgttcattccggatgtttggaatttgagcattttattattccttgtattttccttttctttttctctttttttttttttttttgagatggagtctcgctctgtcacccaggctggagtgcagtgcagtggtgtgatctcagctcactgcaccctccatcccccaggttcaagcaattctcctgcctcagcctcctgagtagctaggattacaggcatgcgccactatgcctggctaattttcatatttttagtagagacagggttttgtcatgttgtccaggctggtctcgaactcctgacctcaggtgatccacccacctcagcctcccaaagtgctaggattacaggtgtgagccactgtgcccagcctcatgggctttcttatttttaattttcctcctgtaagattcatttattctgggctgggcgaggtggctcatgtctgtaatcctagcactttgggaggctgaggtgggaggatcacttgagcccaggagttcgagaacagcttgggcaatatagtgagacccagtctctacaaaaaataaaaaattagcctgacatggtggcgcacacccgtcgtcccagctacttgggaggctgaggcaggaggattacttgaatggaagagaaggaggcttcagtgagccatgatcatgccactgcactctagcctgggcaacagagtgagacccagtctcaaaagaaaaaaaaatgcatttatttattccaagtgtgtgagtgcatagcatttgtgattctggtctttgctgtttccagagtttcagtgattttaagattctggaattcagagatcccaacagccactgaattcaaaattcccagatgctcagttatttcaagtttccaatatgttgtgattgcagaaatgctaggctgtgctatttcaaattgctgaggggccaggactttggaatccaaagattct[149 bp omitted]ctgcctcagcctgccaagtagctgggactacgggcgcccgccaccacgcctggctattttgtatttttagtaaagatggggttt[131 bp omitted]aatggctgggtgcggtggctcatgtgtgtaatctcagcactttgggaggctgaggagagtggatcacctgaggtcaggcaggagttcaagaccagcctggccaacgtggtgaaaccctgtctctactaaaaatacaaaaattaggtggccgtggtggtgcacgcctgtaatcccagctactcaggaggccgtggcatgagaatcacttgaacccaggaggcacagttatagtgagctgagatggcaccatcgcactccagcctgggtgacagagtgagactccatctcaaaaaaggaaaaaaaaaagaaagactagaaggaaatattcaaaatgttaatgatggttccctgtgagtggtgtgattttgtcctctttcttctatttttatttattttccccaagctctctatggtgttggtgtatttctctatagtggaatgtgtaaatttaaagtataaatctcagctgggcacagtggctcatgcctggtttgagaccagcctggacaacataatgagaactgtctctactgaaaatgttaaatattatctgggagtggtggtgcatgcctgtagtcccagccataggggaggctgaggcatgaggatcaattgagcccagtaggtggaggctgcagtgagccatgatcttgccactgcactccagcctgggcaacagagtgagactctgtctcgataataataaccctctattacaacatatcagtgcatgaatttgtgattttataattcaaaatatgagcatctttaattgtcagatttggtgacttcaagaatcagtaataatcagtctatgatactaactttataattattttttttaagagaagagtttccttttattttattttatttgagacagagtttctctctgttgcccaggctggagtgcagtggcgcaatctcggctcactgcagcctctgtctcctaggttcaagcaattctcctgcctgagcctcccgagtagctgggattacaggcatgcaccaccaggcccagctaatttttgtatttttagcagagacggggtttcaccatgttggcgaggctagtcttgaactcctgacctcaagtgatccacccgcctcggcctcccaaggtgctgggattacaggcatgagccaccgtgcccagcctaactttataattctaagatcgtgttcaaacctttaaatgctctagggctctaaaatgttactatcctaagacggtgacactagcgtttgattcttacattctatgattttttaagtttctctgtggccaggactctgtgattctacaatgggatgctcagccatttcaacatgttgttattcatcccctcttgatttcaaaatcctgagcctcaaggttccttgcctttactttcaggagggcctaggaataggcattttgggggggtccacctgacccctgcttctctgagaagtgatctcttcccgctgtctacgcacacggagtgttcaggactgttccatgtggctacaaccctcttcccagtcaagatgcagggaccaagatcagcaggagaccatcccctggtccaatggtgacaacagtaagagcagttaacagttatgtgccaggtattatgctaagcactacattaatgtatttaatcttggcggggtgtggtggctcacacctgtaatcccagcactttgggaggccagggcgggcagatcacttgaggtcaggagttcaagaccagcctagccaacacagtgaaaccccatctctactaaaaatacaaaaattagccaagcgtggtggcatatgcctgtaatcccagccacttgggagactgacgcaggagaatcactttaacccaggaggtggagtccagcacccagccgagactcacttgtttttatttatttatttatttatttttatttttattttttttgagacggaatcttgctctgtcacccaggctggagtgcagtggcgcgatctcagctcaccacaagctccgcctcccgggctcacgccattctcctctc[133 bp omitted]gcctcccaaaatgctgggattacaggcatgaaccaccacgcccggcctatttatttatttatttagagatggagtcttgctctgtcgcccaggctggagtgcagtggtgcagtcttggctcactgcaacctccgccttccgggtttaagcgattctcttgcctcagcctcctgagtagctgggattggaatgagaccaccacttctcctgttgtccttcccagcttctcccccacctccccttttccctagtttataagacaggaaaaaaagggagaaagcaaaacgctggaaaaaaacagaagtacgataaatagctagatgaccttggcgccaccatctggtcctggtggttaaaataataataataatattaatccctgaccaaaactactggtgttatctgtaaattccagacattgtatgagaaagcactgtaaaacgttttgttctgttagctgatgtctgtagcccccagtcacgttcctcacgcttacttgatctatcgtggccctttcacgtggaccccttagcgttgtaagcccttaaaagtgctaggaatttctttttcggggagctcggctcttaagacgctgatgctcccggccgaataaaaacctcttccttctttaatccggtgtctgaggagttttgtctgtggctcgtcctgctacagaattacaggcacgcgccaccgctccgggctaatttttgtatttttttagtagacagggggttt[144 bp omitted]agtggctcatgcctctaactgcagcaatttgggaggctgaggcaggtggatcatttgaagtcaggagtttgagaccagcctggccagcatggtgaaacctcatctctactaaaaatacaaaaattagccaggagtggtggcatacacttataatcccagctacttgggaagctaaagcgggaggatggcttgaacctgggaggcggaggttgcagtgagccgaggtcaagccactgcactccagcctgagtgatggagcaagactctgcctggaaaaaaaaaaaaaatagaggagagagcagagcagacacaagagacacagagacagagagggagagaagagagggtgactgctttgattcaggcaagacttctcagtcccagaatgaacccactgttgtgccaagactcagtcatgtccaggtgtatgactcgagattgctgaaggaatgcccggggcagggcacaggcacaggttattggagagaaggagcagagaacatctctatgtggccaagactcccagatggccctccatatagtcacacacagctatcctaaagactacatttcccagcatcccattgcaatgaggctcctggccagtgggagcaggcagagtgatgtatggaactcccaggttctgcctgaaacaggaaagggcactttctcttcttctttctctcttcctggctggagggcagacttggtgacagccatctaggaccatgaaggcaggcttactccccgatggatggcagagccccaggtagatagagcctgggtcctgactccagtgaggtgcctacagtcctgggctgcaaactcttggacttctactcaaaagaggagaaaacttcgatctcatctaagccactatatttggggggctctttgctacagctcctggattcatgtagcaaacataccccggtttcctcctgtattacttaccatgctctgcggctgctctggtgggctgctctgggacggggccgggggtggaatgggagctggtggggcaggagcagggggccctgccctggcctcagatccctcagtgatgggggacagctctggctccggccccccgggccctggccccccatgacgatggaagaggcggctgatgatctgctggtactgtttcttgtgggtagggggcagggccacagcaggggcctgctccatggagcccctgcgtttgaggggccggggaatttccgccaacacccgtgccacctcctccagctcgggcaccgactgtgcctccggtggcagtgctggctgcagcctcgtggggctgagaggccttgctacagggccttcatccacatcgccagcctccagcactggtgtcagcagcccctctatctccggctcaggctccagctcggtggggggtttggggggtcctagccggaacaagagcccatcagaggacaggtccccaggagacacccaacactccctctccacaacttccagggcatacaaccagcacatgattttctgtgtgacctcagggaagttccttgccctctctgggctacactttccttgggctgtgaataatatacaattatgatgcctcccatttattgagcagttagtatgtgcctggcgctttacatgcctaccttattgtaatctcaccactgctttgtgaggtagatacactgccatctccacattaccgaaagggaatctgggcctcagagaggacaagtcagttgcccaaagccatgcagttgggacttgaactcagttctggctgactctagaatctacttctaccaaccgtgatagatgtgattttctgagatcctgagagtttcctctcctaacatctcaggcagaaaactccagcaggaagtagaatcctggtgtttaatgatttcttctctgtcttactcattctgacagtaaagcaggtggaaataaaaatatgcattattggctgagtcgagtggctcacacctgtaatcccagaactttgggaggccgaggcaggcagatctcttgagatcaggagtttgagaccagcctggccaacatggtaaaaccctgtctctactaaaaatacaaaaaaaaaaaaaaaaaaaaaaaaattagctgggcgtggtggcacatgcctgtaatcccagctactcggaaggctgaggcacaggaatcgcttgaacccaggaggcggaggttgcagtgagccgagattgcaccactgcaccactgcactccagcctgggcaaaagagtgagatttcatctcaaaatatatatatatacacacacacacacaaacacacacacacattatatatatagtgtatatatatttttatatagtatgcatatacatataaataatacacacacacacacacggctgagcatggtggctcatgcctgtaatcccagcactttgggaggctgaggtgggtggatcacctgaggtcaggggttcgagaccagcctggccaacatggcaaaacctcatctctactaaaaacacaaaaaattagttgggtgtggtggtgcatgcctgtaaccccagctacttgggaagctgaggtaggagaatcgcttgaacctgggaggtgtaggatgcagtgagctgaaacctcaccactgcat[215 bp omitted]gaggcaggagaatggcgtgaacccgggaggcggagcttgcagtgagcaagcaccactgcactccaacctggaagaaagagcgagactctgtctcaaaaaaaaagagtgaaactctgtctcaaaaataaataaataaataaaccccaaaacacacacacatacacattatttcattgaatccccgtcacaattctatagggtagatattattaatctctcttcacagacgggaaacagagtttcggacaagtaatttatcttcagtcacacagcaagttagcagtgaagagagactccagcccatctgcttaactcactgatctcacacctcaaaatattaataaattattataactaatatggtagctatttatttgagactgggtctcactctgtcacccaggctggagtgcagtggcgctatcacagctcactgcagcctggatctcccaggcttaaatgatcctcccacctcagcatcctgagtagctgggactacaggcgcccactaccatgcccggcagattttttgtacttttatttttagtaaagtctattttagtttcactatgttgcccaggctggtcttgaactccagagctcaagcaatcctgtctgcattagcccaccaaactgctaggattacaagggtgagccacggtgcctggctaatatggtagctattgatagcttactatgtatcagatcctatttatttatttatttttgagacagagtctcaccctgtcacctgtgctggagtgcagtggcatgatcttggctcactgccacctccgcctccttggctcaagctgagtagctaggactacagtggtgagccaccatgcccagctaatttttttttttttttttttttttgatagagatgggatttca[131 bp omitted]gaatttaataacatatgtcaataggatcgattctatcattatttgcctttttttttttttttttttttgaggcagagtctccccgtcacccaggatggactgcagtggcgcaatctcggctcactgcaacctccacctcccgggtccaagtgattctcctgcctcagcctcccaagtagctgggactacaggcgcccgccaccatgcctggctaatttttgtatttttagtagagat[136 bp omitted]gaggcccagtgaggttaagtgacttgcccaaggtcacacagcgtggaaccaggcagtctggcttcagggtccacacttaacctttgagctatccctggctcctacccaaattcccaaactcacctggcctagctctctgcagggacagtgcttgtaaagaggcatttggctgtgatctccccacctcccagggctggtctggtccccctgccatttgtcctcccttcacccagtcctctagggccctcattgctgactcaccttcgttcacagggggccatgtctgttggggatgctggggggctggggtaggggtttggggttgggtctggggctgtgggggcagctggggctgtggttgtgattgtggctggggctgtggttgtggttggggctgcagcttaggcgggggtgctcgggtgaagaggggggacccagggagcatggcgcggctggccccgtgctcccagaaggcgttctgcagcttgaagatcatgctgagggggatgggacgctggcgcggggccccgcggggctgggggctggaggggggcatggggatgcggctgacgggctgccagctgcgaggcaaagtgcccgacggccccgcggagcccagcgagcgccggtagctgcccgcgtctgaacgccggtcgctggccagaggagagaccttgtaattgcgcggcagggtggcgctagtgaggttgtcctggggaagagggaagggagaaggggatcgggtgagagagggaaggtggaggggaggtaaagacaaaagacgagaagggagaggaggtgagggaagccctgggagtgagggagaagaaagggtgaggaaggagcagaaacccagcacagtgaagggagagcgtgggaacgggcgccgagacccagatcgcagccccgagggggagactggccttgaccccgctcccccaccccactcctcgaccttccccagcctctcctccccaggcgtcgcctcctcaccttgccggtgccccccagtccatccaggctgctctccctccaaggcaacagctgcaggctcggcgaggcaggccttgcgaagacgtccaggcctgcggggcgggaatcattagggtctgtggggctgcctctcctccgggtcctccattccccgggcctccaccactcacgttcatagctcgctgtctgcgaaggcttcttctcgtacgccacgtccaggtcagactcgttccaggctttcggaggccgccggcgcagcgtcaggtcgtctggggagaagtttccagggaggatgagacgggaggggtggcgagccccggatcctgcccgctttgaccccgcgagtcaaaggccccgcgaggggcccctgggttcaccttgcgcgcgcagaggcggggcgaatgcgctgccgccggagcctagcagggagctcccgaaggcggacgctggcgcgtcgtaggctgtggcaggggggcgcggtgacggcccacgctcggggaagaaggcctggggcccctccgccagggggctgccgcggggggagcctgcgcggcccaggaagtcgaaaggcgtggggggaccctgctggcggagcgggcctggcccgggccgcggggagggcgcacggccgagggagctgcctgcgccatcgaaggcgcggggccggggcgaggtcgcgcggtccaggctgccgtaggcgtccggctgcaggtagagcggggtgcgcggcgacgacggccgtcccttgggggacagcgggctgtaggggtgtagggttggggcactctctgatcgtccgaacggggtgtctgcgccgtcggtggccgccttccggggggaccctcggctgccgaagggctcagggatcgagctggagctgtaccggggcggctgtggggaggccagggcattgagggatggatcaaaggagacattagtggaagggttggtgtgtgggcgggggtgtcaagagagatcactggaggtcaacccagaggaggctgaccggccatggaaattcaggcacagagagcccaggtgagtagtggtggggagacagccctgaatcagcactgtggctagcccattactctatgtcacctttatgccacttaggtaaacacctctttccttctgagggtccctttagatgtccacttccactggtcccctcttttctatttctttctttctttctttctctctctttcttttctttctttctttcctctctctccttccttcctttctctctctctccttccctccctccctccctccctgcttgcttgctttctctctctctctttctttctttctttctttctttctttctttctttctttcttttctatctcggctcattgcagcctcaacctccctggcttagtgtgatcctcccacttcagcctcccaagtagctgggattacaggtatgcaccaccacacctggctaacttttgtatttttagtagagacagggtttcaccatgttagccaggctggtcttaaactcctgacctcaagtgatccgcctgtctctgaaagtgttgagattacaggcgtgaaccaccgtgcccagccagatttttaaaaaatcatttgtagaggctggtctcaaactcttagtctcaagcaattctctcacctcgccttccaaagtgctgggattccaggtctgagccatcgcgcctggcctggtccccttttttcaagttcccttgaagagcccacaacctgcataactatatggggcaattttgcctgaaatccaggcctctggtctggactgtggcgagaggctggctttggagatcaaggtgggaaccaggcttaccctagaagggggtccggcctgcgggccaggaggcgcgggagagtctgaccacagcgactccagctgcttggtcagttcatccaccttggccgccgccgtgtccagctccatctgcttcagatccatgtgtttcatggccagcgctgggaaggtgggagtggaggtaaggacctggcctcctggcaggggccggcctcagcacccctcgcccgctgccgaggtccccgcctcgccagccccgccccctactccagcttacactggaagttcatgtccagaaagtcccgcgcgctctggaatgcctcgctgtccatggtgccggccggagcgggcgcctgcatggtggggagggagggagctggctaagaccccgcccctctagaccccgccctcagggagtcagacgccgtcaggagcgggacaacgcctcaactcagttccttcccctggaagccctttaccctttcacctccccagctgggaaatgccaactcctccaaagccaagtccatgcgccacggagaagtccaaacccagtctaaaacctccggaattcactttctctttctttttttcttttctttttttttttttttttgtgtatgtgtgtgagacagagtctcgctctgtcgcccaggcgggagtgcaatgacgcgatcttggctcactgcaacctccgcctcccgggttcaagcaaatcttctgcctagctgggactacaagcgcgcgccattatgcccggctaatttttgtagttctgggattacaggagtgagtctccgcgcccggccgtgtccatctctttatctcagtcctaagacctgaatcactccttgaacaattatctattgatcacctacaatgtgccggtaaacataggatggaataactatgaattactgaatgtttactagggaccaggacgc[354 bp omitted]ctagaacccatgcctactgcttggggtataatgtagtaaatgtagtaaaaacaatatccgccgggcgcggtggctcacgcctgtaattccagcactttgggaggccaaggagggcggatcacgaggtcaggagagcgagaccatcctggctaacatggtgaaaccccgtctctac[198 bp omitted]caacaacaataaccagccaggcgcggtggttcactcctgtaacccgagcactttgggaggccgaggtggatggatcgcttgaagccaggagaccagcctggccaatatggtgaaaccccgtctctacaaaaaaatacaaaagttagctgggcatggtggcatgtgcctgtaatcccagctactcaggaggctgaggcacaaggctcacttgaacctgggaggcacaggttgcagtgagcatagattgtgtcactgcactgcagcttgggtgacagagcgaggctctatttaaaaaaaaaaaaattaattgaggggccactcccttctagagtggtgagaaatgccgtgcaccgaaagcttcatttgatggtcaaaaccaccctagcaggcaagaaagcatggctcagaaacatatgttcaaggtcaccctgcaagaagtcggtagtaatcggtttcacacccgcatctaacttattctgggtcatctctaccagattagaggggtcctagagggaagcgactgctcagcttcctttccctagggtccccattcagtggaggtctggctctcactgacccattgttagcaagaggaacagggaggtggccaggggtggaggggcagctgtggtcactggcccagtgggagggagctaggccactaggaaccggtcaggccagcaccatccctatccccatgctagccaccacacccaccagctctgccacctccctgctgcatcgaccacttagctctggcagtataggcagcagggcaggctggggcatgctgatacccgcctctgtctgggaagtcgaaggaacagaacctgttcaggctggcggctcatttggatgaacagggagtgtgtgaccttgggcgttgagtcctctccactccctgggcctcagtctccccaacatcaaagaagaaggcaaatcacctttttttttttttttgagatagggtctcgctctgtaacccaggctacaattgtgactcactacagcctcttgacctcccagctcaagtggtcctcccacctcagcctcctgagtagctgagactataggtatagcctcgcaccaccacacccagctaattttttttttttttttttttttttttttttttttgagacggagtcttgctctgtcgcccaggctggagttcagtggcgggatctcggctcactgcaagctccgcctcccgggttcacgccattctcccgcctc[224 bp omitted]ctaaggcgggaggatcacgaggtcaggagctcgagaccatcctggctaacacggtgaaaccctgtctctactaaaaaatacaaaaaaattagctgggcgtggtggcgggcgcctgtagtcccagctactcgggaggctgaggcaggagaatggtgtgaaccagggaggcggagctttcagtgagccgagatcgcgccactgcactccagcctcggagacagagcgagactccgtcccaaaaaaaaaaaaaaaaaaaatttgtagagacaggggtctcactttgttgctcaggctggttttgaactcctgggctcaagcaatcctcccgcctcagcctcccaaagtgctgagattacaggcatgagccaccacacctggccaaatcagctattctgaaaggcccctttaatctctatgagccccagactttcaaactgtaaggaccttaggactgtaactaaagttctacagagcctaaacccctcagctaaagagcctattgttggaaagttctgagtccaagattctatctttggaacattctagaattctccaatttgtctaacccagaattctgagtctttctgtaccacattctacctaacccagggttgcactgctctggaagtctagatggatggtatagtgcagctggtaaaagcatgagtaagaagtcagacttcaaaaattcaaatctgagggccgggcatggtagcttctgcctgtaatccttgcactttgggaggccgaggggggaggatcacttgaggccaggagttcaagaccaacatggccaacacaatgagaccccatttcttaaaaaaaattaaaataaaatcatcaaatctggcagcaccaccgtccaaccctgaccacagtacctcagtctcgtaatccgtaaaatggggatgaaagttcacctcataggactactgtaagaatccacctggtcagaaggtgcaggaagaattcagagctctgagaattgaggcctcaggaagaagagactacaggaataaaaactcgggcatttagaatttcagagatacacaaacaatactttgttaactgttaaaatagataaatgagcaagtctgtgcagccctaatgccagctgtaagtgactctttttttttcttttggtagagatttagtctctctcgcgcctgtggttaggctggtctcgaactcctagcctcatgggatcctccccggctcgatctcccaaagtattgggattacaggcgtgagccacggcgccatgatccccaaatttccaagattctcagattccatactgacattctctggctctcaggaaatgccaaccctgggtgtggggctgtcgcggggacaggcggtggggacgtcggagccaccagggggcggtcacgcccggacccccgccaggagggcggactgcgcctgagctcaggcccggggaatgcgcagcgggcccgggcaggtgctgtacatcccggggcaagggagctgggccgggcggggtacaagggcggggcgcgggggtggcgcgggccgtgtgtctgttcccaggcctctgcccctgacctctgcctccgagtcctctcccatgtgctcccctctagctctagctccgagctctcccgcgggctctgggccagccgcaggtactctcccctgggctcctctctccgctccacccctggctctccttccctggcctcctctgcaccccagccaggttctttagggctaaggatcctgtggacttcctggaggagtcatcttcagtaggaaccgggtcagagagccagactgagctgggaacacccaggctggactcctacagccctgtcgggtcacactgaatctggagaggctccactgtctctgggactcggtttcctcctttgtggacgtctatggaatgggctagggcctttcttgctctaagcctctacttgggcttgttatttagcttctctgtgcctgtttcctcatgtggaccatgggaagaattaataccttcgcctcaaaggggtatgaggattgagtgacataatttataagccgtgattagaacaatgcagtgcgcgaaataaagttcacacatacaggattcataattaccagatgtccttggctgttcattataataacacagggtctggcaacagagtgaggggtccagactcaatgtaatttttttttcccctaaaagggccctttcaactctttctgagatcatacaagccctgagttttgacacccagggtctcaacttcctgagcccttgcctctcagagtcctaaatttcccctgtacattcctgagtctggccagtgatcaccctcagtcacttagggacgggagggctgggagagccctggaagattccagacagaagctggcaaaagcccagggtgtgggcaatatccactctccagcctccgtttctccactcgtaatgaggagtccttccctggggtcagcaaaccttattcaaagggagacctctcagtcacccaagattcctctagacaatgcgagctttcctacctacctacctaccagctctgagcttggtacacccagagccctgttttggcaaccacggttattatttttaatttcatttcaggttatcatcaaatgcccttcaagcccagacattgggaaacactcctctctcatcagatgctcgcctcccccattctgtttttaatcccccttcttaggacgcatgggggtggagagaacggggagatagacagagggaggtgcctggtcctgccctccccccgcctcaaggacagacagacacctccagaattagcctctgtccctcccttatctcccacaataccccaggtcagacagatgggcgtggaggtgacatttctcacctcagggtcagggcaaggagccctgaggcagaaggttagtcagaaaatctggcgggggcggatggaatcccgtcccccagagagctgcagaagaaggaggaggcagaatcctgaccctacaaactctactgcctgtgtgagctccaagcctcagtttaccccttcctctccgtgtaatggttaaatgcccggctatgcaaacctcccagaatccaatagccgctttccggaattctgccctgggttctagaactacctctgcaaacccagctgtttcccaccccataaggcaataggggagcccacctccgccagggggtgccctagggcggatgtcccttctctggttaggcaggtctgacgcccaggttaatgacatgttgggttcgctcagcggcacagaggaggttggagatctgcctcggtgttttctctcctaccccgcccccatccccgagccgaaaagtcgggggagagccgggacacagcctccggagggaccccgggtacctgtcctgctccacttcaggaacccaggctccactatccctgccccacccttaattctgctcagagacctagaagatcggtcgagacagcagcttgaggctggcagggtggtcacccattccaccttgagccccaccagtctgagcctctcatttctgaccaagactcggggattcgaacccctatactacccaaagactcggcttcctagagccccccagttcgagggactcaggaattccagctccaacgtctccccgggatgaaggggtagaatccctccattccaagaattcaggcatccgaacccgctttccttccctccagtaaaacaggcaacggagtttccttctaaggatccaggtgtcggcgcgccccaaattccgccctgggacctggcgtccgagtcccctcccaatcctcccagggacgcgggtgttgggctttttcagggcctctggtccccaggagggtgaaactcacggatccgggcagatcctggcacctgggggcttcctccagctcgggctccggcttggggagcggagaacggggcggggcaggagctgggaacaggttagacgacgtgacttgggctggagggaggcgggtcccggtggggagggggagccaaggtcgcctcgagcaccttgggacttgtagtcccggagggacaggacgtagcccaagacgatcccatttggattcacccagagtccatttcacagacaggaagggcgaggcccagaagccgagagcgaccaggccagggagatacagaagagccgagacgcctgcctcgctgtggctggagactgactcctgagcccttgccccaccccttcaggcgcactatcccctttcctgatcagtatcccccagggtctctgagcccgaatctccccgtcgataaaaagcgcgggttggatcttcaaaggatgtcccagcaagagttcaaaatcttagtttggactacaacccccagcagcctccgcgaccgccctcgggcgactctttgcctcgggtcctgtgggaattgtagtcctggagcccgcaggggctgcaccccggtgtctctctcgcccacgcgaaggaaaccgtctggagatcctggataggggaaacatttccccttccccttgaccctccctccgctctggaaagcctctcccacctggggagaaggggtgccccaattctggagtaggatcctaaatcttggcagagggggcgggaagtggcgctgacacactggccaggaatgcagtcgggtcaccctgtctagccaccgtctcgcggctccaaccgccgcccaacgcggggcggccccagtgggaagggaagtgggtgcgtcccccaaatctgtgtccacgtgccgctgtttacacgctccctggggcagggaggagtcgccgatcaggtcccttcctgaaagtcatcgaggtttcccacgcatgagactaaacccccgagggcatctacaagtcccatttgatccacaaacgctacaccgtgcccagcaccactccacgcgtgtggggctcctgggtccgaggctccgccctcgagaaccacaagctcctccccctatgtttcccgctcccccggagtccagaagccccgcccctggctggaacttcacgccctccggacggattgcccctatttctccattttcccgcttctcccagtcaagttctgaacttgtgaggcatctgggcctccccagaagacatttaacacagaaagcacagccctactaactagtattcttacctgtctcttcaagaatttcagaccaatcgaccgtcctgtctctttaaggcttaggaagagcagtgtggctgcccctttaaggaggcgttgcaacaaaccatattggacagacgatgggggcgacccatcgggacccgacgggcctctgactccagcaatacagcgaatcagcggctttcgggaatacatttttcggaaaaagacttcttcctcggttttctgctctgcacacgttgaaattttccccagtttttcctgcagatcgggagtcgagcaatgcctacccccgcgctcccgcaccagttgggcgctcccggatgatgccctacccctttggatccacgtggtctgcaacctggtgcgagcagcccgggctacagggttgcctgaggtgtgggtcccaggatggaggagccccaggccggcggtgagggtgcgggttgacggggtgcggagggtgcgttggtggaaggagaaaggggcgtccgagagggttcgggcggaaaaggaggcgtacctgcaagcaggacttgcgaagagcgtgcattcccagtgggcgaacgggaattcgaacggagagagggttatcttgtggggggctacccgtggagagcaaggcgcccccaggggttggatcggtgaaattgaggtcgcccctggggaacaggtgggcagaaaggagaaaccaggttgaggggactggagtgctcacgaggttaagaccaatggaccgataggcgcgccctgcaagattggaccggcaaggaggtgtcagtcgaccccatttccccttctgctgcagatgctgctcggttctcttgtccccccaactttaccgcgaagcccccagcctcagagtcccctcgtttctccttggaggcgctgacgggtccagatacggagctgtggcttattcaggcccctgcagactttgccccagaatggtgagtggtcttgttgacggaaaagagggtcccggtccagaccccaagagcgggttcttgaatttgtcacaggaaagaattagaggtgagtcacagagcacagtgaaagaaacaagtttattggaaactactcctttacagagtagagtgtcctcagaaagcagggggagaaacccacagccctttgttagtatttctacttataagaaactataaggaactatagttaaacttggagtgtgcagataagctcactaaaggtaggggctattggtgttatccacgaccattaatcctgcaacctaagcttgctcatttatgttatatttaagtaatgggggctgcattcttaggacatttggacattctgcaggcttggtggaacatgttctgtatggccataaatattctgtaattataattggtggtcagcctgggatgtggttattttcaggccataagcatgaaccttgtaagtgcctagctactcactttaagatggagtcactctagtcatgttttattaaaaaccagaggccagccaggcgcagtggctggtgcctgtaatcccatcctttgggaggccgaggcgagcagatcacttgaggtcaggagttcaagaccagcctggccaacatagtgaaattgtctctactaaaaatacaaaaattggctgggcgtggtggcaggtgcctgtaatcccagctacttgagaggctgaggcaggagaatcgcttgaacccaggaggtggacattgcagtgagccgagatcatgccactgcactccagcctaggcaacagagcaagactctctcaaaaaaaaacaaaaaaaaaatcaaaaaaccttccctctcctgttccacttaagcctctgccctccctgtttctctctgtagcttcaatgggcggcatgtgcctctctctggctcccagatcgtcaagggcaaattggcaggcaagcggcaccgctatcgagtcctcagcagctgtccccaagctggagaagcgaccctgctggccccctcaacggaggcaggaggtggactcacctgtgcctcagccccccagggcaccctaaggatccttgagggtccccagcaatccctgtcagggagccctctgcagcccatcccagcaagtcccccaccacagatccctcctggcctgaggcctcggttctgtgcctttgggggcaacccaccagtcacagggcctaggtcagccttggcccccaacctgctcacctcagggaagaagaaaaaggagatgcaggtgacagaggccccagtcactcaggaggcagtgaatgggcacggggccctggaggtggacatggctttggggtcgccagaaatggatgtgcggaagaagaagaagaaaaaaaatcagcagctgaaagaaccagaggcagcagggcctgtggggacagagcccacagtggagacactggagcctctgggagtgctgttcccgtccaccaccaagaagaggaagaagcccaaagggaaagaaaccttcgagccagaagacaagacagtgaagcaggaacagattaacactgagcctctagaagacacagtcctgtccccgaccaaaaagagaaagaggcaaaaggggacggaagggatggagccagaggagggggtgacagttgagtctcagccacaggtgaaggtggagccactggaggaagccatccctctgccccctacgaagaagaggaaaaaagaaaagggacagatggcaatgatggagccagggacggaggcgatggagccagtggagccggagatgaagcctctggagtccccaggggggaccatggcgcctcaacagccagaaggagcgaagcctcaggcccaggcagctctggcagctcccaaaaagaagacgaagaaagaaaaacagcaagatgccacagtggagccagagacagaggtggtggggcctgagctgccggatgaccttgagcctcaggcagctcccacatccaccaagaagaagaagaagaagaaagagagaggtcacacagtgactgagccaattcagccactagagcctgaactgccaggggagggacagcctgaagccagggcaactccgggatccaccaagaagaggaagaagcagagtcaggaaagccggatgccagagacagtgccccaagaggagatgccagggccgccactgaattcagagtctggggaggaggctcccacaggccgggacaagaagcggaagcagcagcagcagcagcctgtgtagtctgcccccgggaaactgaggaactaaagaaagctgaaggtgcccacctgggccaccagaaggtgacacccccagaatccctccccagagactgcaccagcgcagccagcaggagcctggcctgggaggacgatttattattacactgggggtttccttggcagctggggtcatcagggtactttcaagaagggctcgtgcaggacatcaaacagcctccgggcctggatgggagggagaaaaaaatgaggaaccagtcattaaaggagctgtttcctgggtaaatctagagtggggttttggttctttattttcccctataccctcaagcatttatccattgagttacaaacaatccagttacaatctttttaagttattattattattattattttttttttttttgagatggagtctcgctctgtcgcccaggttggagtgcagtggcgcaatctcggctcactgcaagctccgcctcccgggttcacgccattctcctgcctcagcctcctgagtagctgggactacaggcccctg[131 bp omitted]ctgcgcctggctaagttattattatttttttgagacagtctcctggtgtcacccaggctggagtgcagtggtgtgatcttggctcactgcaacctccgcctcctgggttccaacgattctcctgcctcagcctcccgagtagctgggcctaaaggtgcccaccactatacccggctaatttttgtatttttagtagagacaggggtttcaccatattggccaggctggtctcgaactcctgacctcgtgatccacctgccttgacctcccaaagtgctaggataacaggtgtgagccaccgcaccctgccaagttattttaaaatgtaccattattattgactatagtcacctggttgtgttatcaaatagtatgtcttattcattctttctttgtgtgtgtgtgtgtgtgtgtgtgtgtgtgtggtacccattaaccttccccatctccctgccagcccctaactaccctccccagcctccaggaactatccatccactcttatctccatgagttcaattgttttgatttttagatacacaaataaataagaacatgcaatgtttgtctttctgtgcctggcttatttcacttaacataataatccccagttcattatgttgtaat[135 bp omitted]tgcctcagcctcccaagtagttgtgattacaggcacgcgccaccacacccagctcattttttcatttttagtagagacaaggt[131 bp omitted]aagagtatccattgtgtgtaagtaccacattttctttgcctggtcatctgctgatggacacaggttggttctaagttttggcaatgtgaactgtgctgcaacaaacaggagtgcagatacctgttccatacactgatttcctttttttggggatatacccagcagtgggattgctggatcatgtggaacctcaacttttcagtttttagaggagcctccaaactgttttccatagtggttgtactgatttacattcccatcaaaagtatatgagggttcccttttcttcacatcctcgccaccatttgttattgcctgtccaccatttgttattgcctgtcctttggataaaagccattttaaggccgggcaccatggctcacacctgtaatcccggcactttgggagaccgaggtgggtggatcaccagaggtcaggagttcaagaccagcctgaccaacctagggaaaccccatctctactaaaaatacaaaaactagctgggcatggtagcgagtgcctgtaatcccatctactcaggaggctgaggcaggagaatcgcttggatccaggagacggaggttgcagtgagctgagatcatgccattgcactccagcctgggcaacagagtgagactccatctcaaaaaataataataagccattttaatagagctgagatggtatctcattatagtttatttttggtttttggttttcttttttgagatggagtctcactctgtcacccaggctggagtgcagtggtatgatctcggctcactgcaagctctgcctcccaggttcatgccattctcctgcctca[137 bp omitted]gcctcccaaagtgttgggattacaggcgtgagccaccatgcccggcctatttttggttttttttgagatggagttttgcttctgttgtccaggctggagggcagtggtgtgatttcagctcactgcaacctccgtctcccgggttcaagagattctcctgcctcagccactcaagtagctgggattacaagcatgcgccaccacacccaactaatttttatatttttagtagagatggggt[136 bp omitted]tgatcaatgatgctgagcaccttttcatatgcctgcttgccatttgtatgtcttttgagaaatgttaattcaaatattttgcccactttttgattggattattatattttatcctatagagttgttagaactcttatcttctgattattgattccttgtcagatggttagtttgcagatattttctcccatcctgtgtgttgtctcttcactttgtggaatgtttgctgtgcagaagccttttattcttttttttttttttaatttttgagatagagtttcactcttattgtccaggctggagtgcaatggcgctatcttggctcactgcaacctccacctcccgggttcaaacgattgtcctgcctcagccttccaagtagctgggattacaggcatgtgccaccatacctggctacttttttgtatttttagtaaagatggggtgtctccatgttggccaggctggtcccaaactcctgacctcaggtgatccagccgcctcagcctctcaaagtgctgggattacaggcccaagccaccgcacctggcttagaagctttttaatttgatgtgatcccatttgtccattttgctttagtttcctatgcttatagggcattactcaagaaatctctgcccagttcaatgtcctggagagcttctcaatgttttcttgtagacgtttcatgcattgaggtcttagatttaagtctgtaatccattttaatttgatttttgtatatggcgagagatagctatctagtttcattcttcctcattggattgcttctgctttgagacaggatcgctctgtcacccaggctggagcgtagtaacatgcttatagctcactgcagcctcaacctcctgggctcaagcgatcctcccacctcagtctccccagtagctgagactacaggcacgtagcaagctcacaccaccatgcccagctagttttttttatttttagtaaaaatgaggtgtccacttgcccaggctggtctccaacttctggcctcaagcagtcctcccgccttggcctcccaaaatgttgggattacaggcggaagccactgtgtctggtctttggttcttttttcaccttaaaactttggggtctcaggttgtgtttatttggggctctctccttcccccaactccttgggttctttcccagagctcttactttctgagggcccaggcctgggcataaggccagatcttctcttgatgcggcgatgagctgttccagagactgaaaggtgaaagcgaggggtcagggcagttgagcacaaaagcctcccctgtcccagctgaggaggggcctcagatattccccaggggagatgagggcctgtgggaaggcaggacgggcaaggggtgggcagggagatggaaggaaatgggtgacaggctttctaaaaaaggcaaggggacagaaatgcctatggggcaggggagccattccttactccaaatgtggtcaggagggtctgactgtccgttttgttgactgacttcacggtggtcagacattcagtcacctggaaagggtggaggcaggagtgtgtcggaagaagaaaggccagcaagactgagcctaggagggcagggctgggtcacagctgtgtccccagactgcctggcgtgcaggaagcactcaataaacgctttttttcccaactgattaaaaagtcatctcaggctgggcgtggtggctcatgcctaataatcccagcactttcgaggccgaggcgggaggatcacctgaggccaggagttcaagaccagcctggccaacacactgaaaccccatctttactaaaaaatacaaaaattagacaggcatggttgtgggcacctgtagtcccagctactcaggaggctcaggcaggagaatcacttgaacctgggaggcagaggttgcagtgagccgagatcatgtcattgcactccagcctgggcaagagagtgagactccatctcaaaaaaaaaaaaaaggaattaggcaggtaattgggcagagggaacagaaggggcaagtgcttggagaagcgagctaggcctgggagaagtgaagtgtgaagtggaggccacggggcttctgagcctgacgggcccttgttgagcctggtgagaagtctgggctttctctcggggtactggggagccatgggaggattttgagctagggagggtagcagcagatttgtgctcaggaaaacccctctagctgcagtttcggtgggatgggccaggaaagacgaggcccagggatgaatggacagtgccttaaaattggaactgaagctcaaccacccaggagctgcggggaggcccaggcagggatgggaggtgaggtggcctcacccgggagacgaagtcctgctctagcttctccatcaggaggtccgctggtttctgctcataggccttgtaggtctccaggtaccgcccagcttcctcggggctgggataacaggatacagggcagccgggaggtgaggtatcagattata[136 bp omitted]caacatggtgaaacctcgtttctactaaaaatacaaaaaagtagctgggcttggtggcgcgtgcctgtagtcccagctactcaggaggctgaggcaggagaatcgcctgaacccgggaggcggaggttgcagtgagccaagatcacgccattgcactcccgcttgggcaacaagagtgaaactccatttcagaaaaaaaaaaaaaaaaaggccgggtgtggtggctcacgcctataatcccagcactttgggaggctgaggtgagcagatcaccaggtcaggagatcgagaccatcccgactaacatggtgaaaccccatctctactaaaaatacaaaaaattagccgggcgtggtagcgggcgcctgtagtcccagcttttcaggaggctgaggc[131 bp omitted]aaaaatcaaaattccagcccatcccccgccaaatacaacctggtagtaaccactgctgggcgcatcttgatatcttttctggctacaggccagctcttgggagcccaaccccacttctccctgggtaaccctgggccagtggtttgctctctgggcctgtttcctcactgtaaagtggggtggtcaggcatagtggctcatgcttgtaatcccagcactttgggaggctgaggcaggaggatcacttgagctcaggagttcaagaccagccgggacaacatagcaaggtgttgtctccacaaaaaattaaaaattagccaggtgtggtggcgcgtgcctttagtctcagctgctcgggaggctgaggcaggaggactgcctgagcctgtcaagttgaggcttcagtaacctgtgatagcaccactgcactccagcctcagcaaaagagcaagaccctgtctcaaaaaaataataataaagtggggaggatggtatgactttgaagatcagagaatactctggaatgctctgtaagtgccaaaagccacgcctggcactgctgaagaaatgttagctattttggaagggaagtcagcacacaaagtgtttgtactgggtttgacaggaggaaaaccagaaacactgcttattttcccg[135 bp omitted]acatggcaaaacccgtccctactaaaaatacaaaaaaattagctgggcgtggtggtgcacacctgtaatcccagctacttgggaggctgaggcagaattgcttgaacccccaaggcagagccgagatcgtgccactgcacttcagcctaggggacagagtgaggctctgtatcaaaaaaaaaaaaaaaaaaattaagaccttgttttacagatgaggaaactgaaggccagagagaggcagtgcctgcaccaggcccacacaggaaggagaagggaagggctgggcagggtgggatgggggagcagggaccaatcccaggtggagcctgaatgaggcagggaagccctcatctcacctccaggcgaggatcaatgtgcagtcggccaggatacacatcttagccagctccttgagggcctgctggggatctttctggaggagaaaatcagaattagaaacctagaagccaggaattacaaaaattagccaggcgtggtggcaggtgcctgtaatcccagctactagggaagctgaggtgggggaactgcttgaacccgggaggcagacgttgcagtgagccaagatcgcgccactgcactccaacctgggcgacagggtgagactctgtctcaaaaaaaaaaagaagaacaaaaaaagaattaaagcctgaaaacacagtagctcaggatgccaagagcctctcacccaattgtcactctctaagctcctactgggtgcctggcccgtgctaagcagtgctaggacccagcagtggctgagacagccctgactctgccctcccagggctcacagtctgatgagcaggacagacctgtccccagacactgatgatctggagtggccagggctgcgatgtgggagccagaggagggactgagcctgcctgggggatcagggagggcttcttggaggaggggacattagagctgagacccaaaggaggatgaggaggaggaaaggatgaaaaggagaccagaaaagggaattccagacataaagaacagcatgggcaaaggatgggaggggaaagagggcttgaggaattataattcgctccctacgggagagaggatgtgaaattccatgaggagcatggaatcttagagacgggcctggagaactgggtagaggttggaggtcacacagggccccataggtcatggaagggagcagaactttctcctagggtgcttaggagccatgtgagttttatgatctttttaatttttttcagacggagtctcgctctgttgcccaggctggagtgcagtgacatgatcttggctcattgcaacctccacctcccgggttcaagcaattctcctgcctcagcctcctgagtagctgggactataggtgcccaccaccatattttttgtattttgtagagatgggggtcttcactatgttgcccagactagtctcgaactcttggcctcaagtgatcctcctgcctcagcctctcaaagagctaggattacaggcatgagccactgcacccaacccaatggaagaggaatgcttgaggccaggagttcaagaccagactgggtaacatagcaagaccctgtctctaaaaattaaaaaaaaaaatcacctggtgggggtggctcacacctgtaatcccaacactttaggatcacctgagatcagaagttcaagaccagcctgaccaacatggtgaaaccgcatctctactaaaaatacaaaaaattagccggtcatggtggtacgcacctgtaatcccagctattcaggaggctgagtcaggagaatcacctgaatccaggaggtggaggttgcagtgagccaagattgcaccactacactccagtctgggcgaaagagcgagactctgtctcaaaacaatcaatcaatcaatcaatcaataaaaattagcaaggcatggtgtcatcccagttgctcgagaggctgaggcaggagaatcgtttgaacccaggaggcagaggttgcagtgggctaagatctggccattgcactccagcctgggcgacagaggagactccgtcttaaaaaaataaaagagagagatatggccaggcacggtggctcatgcctgtaatcccagcctttgggaggctgaggtgggtggatcacctgaggtcaggagttcaagaccagcctggccaacatggtgaaaaccagtctctactaaaaatacaaaaatcagccgggcgtggtggtgcatgcctataatcccagctactcagaaggctgaggcaggagaatcgcttgaaccccagaggtgaaggctgcagtgagccaagatcaagtcattgcactccagcctgggcaacaagagcgaaactccgtctcaaacaaacaaacaaacaaacacaaaacaaaaagaagagatatttaggtggcagagatctgggactaattgaaggggatgtggggaaagaggaaatagacaattttgccctcccctctccttgccaacataatgtcttggtgacccatgtcatctcagatgtgaaaaacgttcctcgctgaggttttagctgcatttcctcttggaagggattcaacagcccactgcacaacctcaaagcccggtgaggctggctagggagcagcccctgcttaccacatccacctggacaagcaggacccgcaaggcgaagttcttccccaggctctgcagccgcccatggatgtagtctgggtgcaggttgtggtagcggaggctggtgggggcagggagcgggagttgagaggtctcagtctcttcaagacccccaaagcccttttccctctcactggaatactaagggctcagagtacggcatgggggacagagggtcctgaggcccacagagggtaagtcacttgccccaggtcactcttccaagaagatgctccgcagggattggcagccagggccacatggctgtgcttacctagaagaccagacccctggcttcttcatgaagaggggaagagacttgggcttcaaggggagaacaggtgccaggggccctagagagtgtgggcacggggacactgcatggctcgcggtgggaagcagggcccactgccaaaccatctgctctggccttggagggctacggtgagggcttcatgacccagggaactaggactggctctgcccagcagtctgcagctgtcacagcctgcagggagcacaggaactcagaggtttcacttcctctgtctggccctgtctgcagaggggcccctaggttggaggggaaagttgtttaactagggtagagatgggagaaatcctgcttctcatcaactccagtcaaggatgtctgggacatgagtgacccagtccctcctccgtcagatccaggagtctgggcccagcccctcctcccttagacccaggaatctggccccagcccctcctcccttagacccaggagtccaggcccccagcccctcctccctgagaccccaggagtccaggcccccagcccctcctccctgagaccccaggagtccaggcccccagcccctcctgcctcagacccaggagtctaggccccagcccctcctccctcagatccccaggagtccagccctcagcccctcctcccccggacccaggagtccggcccccagcccctccttcctgagacccaggagttcgggctccagctcttgttgcactgggcacctccaggccaagaccccctgcctccaacacagggtcccaccaaggcccagaacctgcaggaccatgcccagaggcttctcatagaacagtccagaacactgggacatgaccctcccaggccagtggggtgcccttcctgaagtctggggtggcgccgcagagctcacctgaggaacagggcacaggtgctctggcccagcacatagtcgggaattacgtcgccaaattcccagggcacattgcgcacgaacttcagtacgggattgcccctctggggagggacgaagggcagaagccatcaatagggatgacccttgataaccacagggccctcctccacctcttcttgcacctcctccctcctcccacctcttcccacacctcctgcctcctcgcacctcttcccacacctcctccctcctcccacctgtggcagggtcttttccagcttctctctcctcctaaccctggacagtccctgatcctctgatccaggctcctcccctccatgcccactggcaccaggcctttcctaaagggtccccgggtctgtctccagctcagccctctccctccagccccagtctgcgtgtcctgtggtcctgaacacttcctgccctcacgcccagcaactttttgtgtttttagtagagatggggtgtcaccatattcgccagactggtctcgaactcctgacctcaggtgatccacctgcctcagcctctccaaagtgctgggattacaggtgtgagccaccacacccagcctcattcagtacattttgaataaattaacaaacctggggtgaggaaacagagctacaccaatacagccacagccccagcaagtagagctggggcactctcaacccacacactgctgtcgaatgaatgaatgaatgaatgaatgaatggggagaacaaagtggctggaactcagacctccttgcactggagtcatccctagaacagcgtttcccactgaaaacctcaaggcctcacttctccgtctccctcctcacctgccgagggctcacaatgatgctgttggattttgccccgggtttcagggcctggttgggcgtctctcctgccaggggctctgaccctgtggggcacgtggccccagccccttccagaggctgtgagatggcatattcggcgtaggtctgaggggccgcctgggccgaggtgtccacagtgggaaggctctgtgtagatcggaataagggcttggcctgtggggagaaagggagtttgcaggggactggttggggtgagcagaggacatctgaggccctgtgagttcctctcccctttctttttctttttttgagacagtcttgctctgtcacccagactggagtgtagtggcactatcttggctcattgcaacctccacctcccgggttcaagcaattctgcctcagcttcccaagtagctgggattacaggtgcccaccaccacgcccagctaattttttttttttttttttgagatggagtcttgctctgtcacccaggctggagtgcagtggcgtgatctcggctcactgcaacctccgccccccaggttcaagcgattctcctgtctcagcctcccaaatagctgggactacaggcgtgtaccaccacgctggctaatttttgtatttttagtagagacagggtttcaacatgttgtccaggctgatctcgaactcctgacctcaggtgatccgcccgcctcggcctcccaaagtcctgggattacaggtgtgagccacagcacttgacccctctcccctcttcagggctgcccatcctccttcctcctaatgtcccttccagaaggctgagagctcaaaatctgaattcagccacttctcccccactcctcagcctccactctggtcccagccaccagcgtttcacccttggaccactgaagtcacttcctcaccagctccttgcccacaccctcgccccctggaagtctgtcccctaactaagtcctcatgtccctcctctgctcagagctggtgggtggctcctgcctcagagtgaaagccaaagctgtcaccatcacccacaaggctctagatctgtccctgctccttgcctcagaaactacaccttctaccacttctccttgctttctctactccagccccaccagacttcgttctgcccttgaacacggcaggctctctctgacctcagggctttggcactggctgttccctctaccccagatgtcgccatggctcactccctcacctctttcacgtctctaccaagatgtcacctcctcagagaggccctcccttgaccttcctatctaaagtaggaaggggccaggcatggtggctcatgcctgtacatcccagcactttgggaggccgaggtgggcggatcacttgaggttcgagaccagcctgaccaacatggtgaaacccgtctctactaaaaatacaaaaattagccaggcgcgctcctgtaatcccagttactcgggaggctgaggcaggagaatcgcttgaacccaggaggcagaggttgcagtgagccgagatggtgccagtgcactccagcctgggcaaaagagcgagactctgtctcaaaaaaataaataaataaataaataaatagagtaggaaggtcctctcccccatcatgccctacatccttagcccactttccttttcttcatagccaatgctcatcacccgtcgattgttttcccttgggaaggagatttcaatattgccaggtccttccatttaccaaaatatgtctaaagtgtagatttttttaagattgcaaaacctggcgattcttaaacacgagcaataaattcatgtcttgaaaaatcagggtgctggcctcgtaaaacacatcaggggctacctgctgaatgccagtgtctggcctctgccttagccctctcttagaaccacccatccatttcacagatggggaaactgggacctggggaggaccaaggactgtttccccaagtcgtccgtggcccccaaatccactaacccacaccctggtcccacaggccccatcctatcctcttcgtcctaacagcccccagcctcccaggggccccgcatctccttgtcctaccactccaggagggacctcatcctcgtcgaggggtatcacaaatttcttccttgctggcggccctgagggctggggcaccccctctttgtccttcccagggtccatctggagcctgaaagggaaggtgccaggagcgagtgagccactggcgtctacgttctcatcccgcagcaggaaccccccactcacagccgtcccccacaaaactccgagagctccatagcgtcaggtccccaacacccagcgctagaggctctgtaacgccacgcccctttgacctccaccttcggctcgccccgccccttacaggtccacaagtcccatcgctccgcccctcgcccccaccggattctattggctccgtccccaccatcccccgccttccgttcgtccggcccccgaggctagcatctggacgccctccccacgcctggccttgtccatctctcagactcggcaatgattggcttccgcggcgccaatctccacccgcagtctccgcctcccgcacctgtggtccgggcctcacggtttcagcgccgcgaggcctcacctgctggtcttggagcctcaagggaaagactgcagagggatcgaggcggcccactgccagcacggccagcgtggcccagggctcgcagcacttccggcctctctggccccgctccccaggagagtagagcatagagcagggcgatctctgtacaactctctatggttctggaggaccgcggaggtcgtgggaggagagagatgtggcctgaggatctggctcccaaactgttaagtttcaaagcccttactgagcgcttctgtgtgcccagaatcctggcagggctcagtggagaacagatcgcaggagatccaacttggtccctcctctcagtaaggagagacttaagtttgaatccaactcagacattgacttggcttcagtttcctcattcattcatttattccacacctattccccccacgcgcttcctctcttcccggtcctgtgcgagtccgtgctggtgacacagcagtgaccaacgacagccccgtgttgtcctcccggagcttacggttcagtaagggacacagacacgttcccagtgctgacccagaatgggcaggtctgggatgggagatcccgggagagccgtgggatgggggtcagggggagcgcctgactcagccccggagtccggaagggcttcctggaggaagggacatctgagcaggggcctggctgatgagttagtattagtcacttcctgaaaggatagtatcacactgttctaacttgcagctctctgattactaaggaaatggaatgttttttgtgaaagtattggtcttgtaaattttgtcttctgtgaattgcttgctcatattccttgtccatttttaaaatgggttgtatggcttttttattactattaatttctaggggtactttatggattctgattctaatccttagttacccatattgcaaacatttcctcctagtttctactttgggctttaactttagttatttttggcacagaagttatttgtgtttatgcgcaactatttatcaatctgttccgttctgacttttgcttttggtgtgttaagagccctgccataacccagggtcataatgataaattcttttttttcttttttttttttttttcgagacggagtttcgctcttattacccaggctggagtgcaatggcgcgatctcagttcactgcacctccccctcccgggttcaagcgattctcctgcctccttagtagct[137 bp omitted]ctttgtgacctcccaaagtgctgggattacagtgcacggctataatgatatattctatcatttcttttatctacgtaaaagataaaagccccgtgttgtcctcccagagcttacagttcagtgagggacacagacacggtcccaaacagtaatgacctagaatgagcaggtcatctggctttaatctatgtaagatttatttatttatttattattttttgagatggagttttgctcttgttgcctaggctggagtgcaatggagcaatctaggctcactgcaacctccgccacccacattcaagcagttctcctgcctcagcctcccaagtagctgggattacaggctaacttttgtatttttagtagagacggagtttcaccatgttggccctgctggtctcgaactcttgacctcaagtgatctgcccacctcagcctcccaaagtgctgggattacaagcatgagccacggtgcctggccaagatttatttttgaaagtgcaccgaggtcgttgtttatgagtgatgtaaccaattgtctcaagttgaccaaaggtagatcttttctccactgttctgaaattctacctttatcacataccaaattcccatacacacacgtctatttctgacatttctgttatgttcattgatctttttatttattcttgcctgcatgtacatgacatccctctgtttctttgttcacatcagtctttcatctatgggtgtctatctgtgtctacattttcccattttacttaattttttttttctgggcatggtggctaatgtctgtaatcctagcactttgggaggcctaggcgggtggatcacctgaggtcaggagttcgagaccagcctgaccaacatggagaaatcctatctctattaaaaatacaaaattagagtcccggtgcagtggctcacacctgtaatcccagcactttgggaggccgagacaggcggatcacgaggtcaggagttcaagaccagcctggccaatatggtgaaaccccgtctttactaaaaatactaaaattagttgggcgtggtagcgcacacctgtagtcccagctactcaggaggctgaggcagaagaatcgcttgaacctgggaggcggaggc[135 bp omitted]gaggcaggagaattgcttgaaccctggaggcaaaggttgcggtgagctgagatcgcaccattgcactccagcctgggcaacaagagtgaaactccatctcaaaaaaaaaaaaaaaattttttttgagacaaggtcttgatctattgcccagatttattgtcctgaaccttgcttacctcaaatgcctttttcttttcaccctaacaattgaaatccagaattctaggctgggtgcggtggctcatgcctataatcccaacaatttaggaggccaaggtgggcagattgcttgggctccagagttcaagaccagccagggcaacatgacaaaaccccatctctacaaaaaaacacaaaaattggctgggcaaggtagctcatgcctgtaatcccagcactttggaaagctgaggcaggagaatcacttgaacccgggaggtggaagttgtagtgagccaagatcacgcaattgtactccagcctgggcgacaaaagcgaaactccatctaaaaaaaaaaaaaaaaaaaaaaagctatgtgtgttggtgtgcacctgtagtcccagatactcaggaggctgaggagggagaattgcttgagcccaggaggcagaggctgcagtgagctgcgattgtgccactgcactccagcctgggtgacagagtgagaccaaaaacaaacaaaacaaaacaaacaaacaaacaaaaaaacgaaagaaaagaaaggaaagaaaaaggaaatccagaatcctaggttcttagtattgtttcttgcaatgttagaagatataggggccaggagaggtggctcacgcctagtaggaaggaaggagaatcagtctaatagtctcatcactaggtataattttcccccaggaggccgggcacagtggctcacgcctgtaatctcggcactttgggaggccgatggaaggtggatcacgaggtcaggagttcaaaaccagcctggccaagatgatgaaaccttgtctctactaaaaaatacaaaaaaaaaattagccgggcgtggtggcggacgcctgtaatcccagctactcgggaggctgagacggagaattgcttgaacccaggaggcggaggttgcagtgagccgagattacaccactgcactctagcctgggcgacagagcgagactccgtctcaaaaaacgaaaaaaagaaaaaatgaaatatgcctctgtatccaagaccatacagcgattctagaagtaggtcatcccaagtagaagggcttgtgactcagttatccccttggggaatggaattgccagacttaaccctgcaactcctgcgttttctgcaagggggcgatggtgcaccacaagaggattggaagtgttggggagccggggcctctctgctccgccagaacccagcgggggcaggaccccctagaaggcggcccattccccgctcccgattcatttccttgaagcagaagtgcggtaaagggcccgccgcctgcgatcagtggaattctgaatcggttaacgttagttaagagcgaggggaaaaaattgccctgggttctacgttatttccaagttggcaagttggatgttggatttctaccctcagtttcttttctttttttctttttctttctttctttcttttttttttttttttttgagacggagtctctctctgtcacccagactagagtgcggtggtgcgatcacacctcactgcagcctcaacctcccgggctcagatgatcctcccacatcagcttaccgagtagctggaccacaggcgcgcgccaccacgcctggccaacttttgtattttttttgtagaggcgtgggggtgggggggtggggtctcactatagcccaggctggtctcgaactcctgggctcaagcgatcctcccttctcgccctcccaaagtgtcgggattactgtagtgagccactgctcccagcctaagctgtttcaaaactaaactttggaatcccggattcgaatctccccggctcccagagttgcgcgttcgaatcccccagccgtatccaagctccgattccgcctctttcttccaaacgccccaagttccagaattcagccgcaactccagtttgggccactccccagctacggcccctgctcccatcccaaaccttcccctcctctcaacttcgagccctttgttcgccccggaacgggtggggtggggacggagactgtaaggacgggaccctcaccgacaattccgccaaaggggacctgaacggggggcggagagcagcccggccgaaggctctggaagcgggcaccgccggggggcgcagtgaccaggctggcgtccccgcccgcctctaaacttagccgcggtgacgcgcggcccggcgatcgcggcggggccggggacgcaggggggcccgagtggaggggggcggctcggctcggcgagcctctatttatagcgcccggagcccgaaatagcgcggagcggagcggccgggatgacgcgggagccgccgggggctgactcacccggccccaagcggaggcccccggatggggggcagtggaggcgcctagcccctactccgcgtcctcccgggcaccttttttggtgggacatcccaagtctccgctggagaggctgtggatggatgtacagcaaaggaaagatctgcagcatgagagactgaggttggatcagaagtgggacttccacacacacaaaaaaccccagaactgggccgggcgcggtggctcccgcctgtaatctcagcactttgagaagccgaggagggcagatcacctgaggtcaggagattgagaccagcctggccagcatgatgaaacctcatctctactaaaaacacaaaattagccaggcgtggtggctcatgcctataatcccagctactcgggaggctgaggcaggagaatcgcttgaacctgggagacagaggttgtagtgagccaagatcgcgccactgcactccagtctgggcaaaaacagcgaaactccatctcaaaaaaagaaagaaagaaggaaagaaaaataaagacagaatggaggacctatttatacaaaatgagaaaggcggaaagaggggaggtgaaccagatatacacacttgtttctcaccagcaagagaactgggatgttctggaggcaaaggaatggactcagggaccctgggtagttgccattccagagcacatgccattctccacttgtcacgatttcttgcatactgttcccattccctagaatgttcttccttgccttctcagccttgagaactcatgtacctccaggacctggtgcccagggcaattcctttatttttattattatcattattattatttgagacagagtctcgctctgtcacccaggctgtagtgcagtggcatgatcacgattcactgcaacttccgcctcccaggttcaagtgattctcctgcctcagcctcctgagtagctgggactacaggcgcatgccaccacacccagctaattttttatttttagtagagatggggtttcaccatgttggccaggctggtttcgaactcctgacctcaggtgatccacccgcctcggcctcccaaagtgatgggattacaggcatgagccaccgcgtccagccggagcaattcctcaaataaaaactccgtgacccactgaactgggagccccataagggcagggtcaaggccatctcagtcatcgccttgtccccagcgctgcccagcacaggacaggccttgggataaattaactgcatgaataaaaggtgctggtgataaaataaaatgacatttcccgttataatagcaaatgttgattgcatgctctgtgaccggcacgcatgattctgagccttatctcctgtgggcctcgctgcagccctgcagggatgtacttttattattattatcaccgccatccctatgttagagatgaagacaccaggcccaaaggggctaaaagtactggatctcactgcttgcactcagagctttctcttaaacctaggtcaccttggctccaaaggtgttcggtttccagcatacatacatctgggtcctgtggaaccaaaagctagggagtgagtctcagcctgcagcccaaagaaccttagggggttccccagcacccctttgggggtctacaaatacaaaattattatcataagcggggcgcggtggctcatgcctgtaatcccagcactttgggaggctgaggcatcaggcggatcacgtgaggtcaggagtttgagaccagcctggcaaacatggcaaaaccccaactctactaaaaatacaaaaaattagcagggcatggtggtgggtgcctgtgattccagctacttgggaggccgaggtgggagaattgggagatgaagtttgcagtgagctgagattgggccactgcactccagcctgggcaacagagcaagacctcgtctcaaaaaaaaattaccataataatattgacataatatatgatacaccataataataatacttagttggggggtggggtctcagccttccccaggctggagtgcagtggcacgatcttggcttactgcaacctccacctcccgtgttcaagcgattctcccgcctcagcctcccaagtagctgagactatagtcatgcaccaccatgcccggctaatttttttgtatttttagtagaaacggggtttcaccatatcagccagtgcagtttccatgatattgcaacagaccaaatgcagacacacacgtgaggacccagctgtcttctgttaagcctgacgtgaaagtgatttgcaaaaattaaaacaatgcccttcctctcactaagtttttgtttcaggctgtgcatggtggtacatccctgtaattccaggactttgggaggtcaaggtgggagaatggcttaagcccaggagttcaagaccagcctggagggccgggagcagtggctcatgcctgtaatcccagcactttgggagactgaggcggtggatcacctgaggtcaggaattcaagaccagcctgaccaacacggagaaacccatctctactaaaaatacaaaaattagctgggcgtggtggcacacgcctgtaatcccagctacttgggaggctaaggcaggagaatcacttgaacccaggaggtggaggctgcaatgagccaagatcatgccattgcactccagcctgagcaacaagagtgaaactccatctcaaaaaaaaaaaaaaccagcctgggcaacttaggaagacccctatctctacaaaaaatgttaaaatgagctgtgcttggtggcgcgtgcctacgttctcagctgcttgggaggttgaggtgggaggatcacttgagcctagcaggtggaggctgcagtgagtcttaattatacccctggcaccccagcctggacaacagactgagaccctgcctcaaaaaaatttttttttattttggaaaacatggttattttcatgtaaaagatataacttacattaacattcaattaattttttatttttttatttttttgagatggaatctcgctctgtcgcccagcctggagtgcaatggcgcaatcttggctcgctgcaacctccgcctcccgggttcaagcaattctcctgcctcagcctcccgagtagctgggactacaggcatgtgccgccacaccgggctaatttttcatattttagtagtgacggtgtttcaccatgttagccaggctgctctcgatctcctgacctcatgatccacccgccttggcctcccaaagtgctgggattacaggcatgagccaccacgcctggccaacacaaaattaatttattattattattattattattattattattagttatttttagagatgggggtcttgttgcgctgcccaggctggtctcaaactcaagcgatacttccaccccagcctcccaagtagctaggattacaggtttacaccactgcacccagctacttttaaatgaatcaacaaatatttctaaaatttctcagttttgatttccattacagtaaatattgatagaaatcatacacatcaacaaaaactctttggggtcctcaatacattttttaaattttagacagggtttcactctgttgcccaggctggagttcaatggtgcagtcataactcactgcacgctttgaactgggctaaagcagtcctcccacctcagcctcccaaatagctaggactacaggtgcatgccaccactcctggctgcttttatttatttttgtagagacggggtcttgctatgttgcccaggcagaggccttcaataattaggagtgtaagggggccaggtggagtggctcacgcctgtattcccagcactttgggaggccgaggtgggcggatcacgtgaggttgggagttcgagaccagcctgaccaacatgacctgaccaacatggataaaccctgtctctactaaaaatacaaaattagccgggcatggtggcacatgcctctaatcccacctactcgggaggctgaggcaggagaatcgcttgaacctgggaggcggagtttgcggtgagccgagatcgcgccactgcactccagcctgggcaacaagaatgaaactctgtctcaaaataaataaataaataaatggattaggccgggtgcggtggctcacacctgtaatcccagcactttgggagaacaaggcaggcagatcacttgaggtcaggagtttgagaccggcctgggcaacgtggtgaaaccctgtctctactaaaattacaaaaattaagccgggcacaatgcctcatgcctgtaatcccagcactttgggagacca[134 bp omitted]aaggcacgagaatcgcttgaacctgggaggtggaggttgcagtgagccgagattgcgccattgtactccagcctgggtaacagagtgagagtccatctcaaaaacaaacaaattagccaggcatggtggtgcacggatgtaatcccagctacttaggacgctgaggccagagaattgcttgaacccgggagacagaggttgcagtgagccgaaattgtaccactgcacaccagcctgggtgacagagcaagactctgtctttaaaaaaaaaaaaaaaagaatcaatgaactaacaatcatacaaacctgattagtgtcatgaaggacaagaatgtggaacatcattttaactttgaaggagaggacgagtggatgggagggtagcggaggtttctctgtcaaaggagcatttaaggagagacctggctgggcacagtggctcacacctgtaatcccagcactttgggaggccaaggtgggtggatcacgtgaggtcaggagttcgagaccatcctggctaacatggtgaaaccccgtctctactaaaaatacacgcacacaaaaattagtcaggcatggtggcatgcgcctgtagtcccagctactcgggaggaggctgaggcaggagaatcacttgaacccgagaggcagaggttgcagtgagccgagattgtgccactgcactccagcctggccaacagcaagaatgtctcacacacacacacacacaaaaaaaaaaaaaaaaaaaaagaggaagaagaagaagagacctgtccatgtgccctggctcacacctgtaatcccagcactttgggaagctaaggctggcagatcgcttgagcccaggagtttgagaccagcctgggcaacatggtgaaacaccgtgtctctccaaaaaatacaaaaaaaaaaaaaatcgcatggcttggtggcatgtgcctgtagtcccacgtactcgggaggctaaggtgggaggatcacttgagcccaaaaatgtcaaggctgcagagggccatgatcatgacaatgcactccagcctgggcaactgagtaaagccctatctcaaaaaaaagaaaagagaatctatctggcagttttctctcttgccttccaatcgttgcatctcatttatttttcttgtcttacagcatttttttgtttttgcttttgttttccgagactgagtcttgctctgtcacccaggctggagtgcagtggtacgacctcagctcactgcaaccttcgcctcccgggttcaagcaattctcctgcctcagcctcccgagcagctgggactacaggcgaacattgccacacccggccttttttaaaaatttttttatttttatttttattgttttttttgagacagagtttcgctcttgttgcccaggctggagtgcaatagtgcgatcttggctcactgcaacctctgcctcctgggttcaagcgattctgctgtctcagcctcctgagtagctgggattacaggcatgcaccaccacgcccggctaattttttgtatttttttttttagtagagatggggtttttccacgttggtcgggctggtctcaaactcctgacctcaggtgatccacctgcttcagcctcccaaagtgctgcaattacaggcatgagccatggtgcctggccaaatttttgtatttttagtagagacggggtttccccatgttggccaggctggtctcagactcctgacttcatgatccatccaccttggcctcccaaagtgctgggattacaggcatgagccactgtgccaggcccattttacagcatttcaaacacttccaggactatgccgcacagtaacattgattctcacagcagccctccacactacaaccctctgagatgacttatctcaccatgcccattttacagagggagaaactgaggcacagggaaggtagactcttatccaaggccacatagcaggtaaacaaacaaactaggactccaaccaaaccttgtgctctgtctcagccttaaaagaaaactcaataaacattctggcctttttgtttttgttttgagacctttattctgttacgcaggttggagtgcagtgtggtgatcacagctcactgcagcctcaaactcctaggctcaagcaaacctcctacctcagcctcacaagtagctgggactataggtgtgcaccgccagagctggctatttttgtgtagagatggggtctcgctatgttgcccaggctgctgatctcaaactgctggcctcaagggatcctcctgccttggactcccaaagtgttgggattacaggtgtgagcctccatgttcagtccacattctgtacttttttttttagatggagtctcactctgtcacccagggtggagagcagtggcgcaatcttggctcactgcaacctctgcctcccggattcaagcgattctctcaagtctcag[135 bp omitted]catcctcccaaagtgctgagattacagacatgagccaccgtgcccagcctattttttttaaaacgggaaaaatatctgtaaattgccacagtgacccacggagcctggatgaagagcgggaagcctgaggtctccttcagtctccatcctctctctgagcctcagtttccttccctatgtggaagggttggaaaagatgttctctaaaagcctcagaaactctgccgttagcgtggaggggacagaagctcaaacagattgcattagtttcttaacggctactataaca[145 bp omitted]cctgtctctactaaaaatacaaaaaattagccgggcatggtggcgggcgcctgtagacccagctactcgtgaggctgaggcaggagaatggcgtgaacccaggaggcggagcttgcagtgagccgagatcacgccactgcactccagcctgggtgacagtgagactccgtctcagacaaacaaacaaacaaaaatagttttgtagagatgaagcgggggggcggggtcttgctctattgcctacgctgatctcaaactcctggccttgacattgcaatctgcccgccttggcctcccaaagggctgagattacgagtgtgagccaccctggcctaaacatttaaaacgacatgtgtgacagccaggcatggtagcctgcacttgtaatcccagctccttggaaagctgaggtgggaggaccccgtgagaccaagagttggagatcaacctgggccatacagtgagactccatatatagtggattccaatatagtgagactttaaaatataaaataagggccgggcatagtggctcacgcgtgtaatcccagcactttgggaggccaaggtgggtgaatcacctgaggtcaggagttcgagaccagcctgaccaacatggtgaaaccccatctccactaaaaatacaaaattagccaggcgttgtgacacacgcccgtaatcccagctactcaggaggctgagggaggagaatcgcttgaacccaggaggcagaggttgcagtgagccttgatcacgccactgcacttcggcctgggcgacaggagcaagacttcatctcaaaaaagaaaaagaaaatatatatgtgtgtgtgtatatatatatataataagtaaaaataaaatcgtacatatggatctagcagactcatatacctctggttatatttccaaaggaattgaaatcaggatgtcgaagggttatctacactctcaagttcattgcagcactggtcacaatagccaagatatggagtcaacctaagtgtccatcaagggacataatggataaagcaaatgttgcatatacacacgatggaatactatacagccttgaaaagggaggaaattctgccattcaagacaacatggatggaactggaggacattattctaagtgaaataaaccagacacagaaagacaaacaccacatgatcccacttttatatggaatcttaaaaagtcgagctcatagaaacagtataaaggtggctactagagtccagggaagtgggagagggttgggaaaagagaagatgttgatcaaagggtgcaaagtttcagcgagactggagaaatatatttcagtgatctattgcacagcatggtaaccacagttaatactaatgtattgtgtatttcaaagttgctaaaatagagtttaaattttttaaatttgtaaatattattttttattttttgtcactacgtgttctcatctgattttttttttttttgagacggagtctcgctctgctgcccaggctggagtgcagtggcacaatctcggctcactgcaacctctgcctcctgggttcaagtgattctcctgcctccgcctcccgagtagctgggactacaggcgtgtgagaccacgcccagctaaatttt[169 bp omitted]gtagagatggcatctcactacattgcccagattagtctccaactcctgggctcaagccatcctcctgcttcggcctcccaaactgctggatttataggcgtgagtcaccgcacctggccctgacatcttgatgtcaatttatttgcaatatacacccagaagtgggattgctggatccatatgtgtaattttattttttatgtgtttgtttgtttgtttatttatttattttaagacagtctcactctgtcgcccaggctggagtgcagtggcacaatctcggctcactgcaacctttgcctcccatgctcctgtgatcctcctacctcagccttctgagtagctgggactacaggtgtgcactatcacgcccggctaattatttttatttattattattattattttttaagacagagttttgttctttttgcccaggctggagtgcaatggctggatctcggctcagcgtgacctccgcctccctgggtccagcaattctcctgcctcagcctcccaagtaactgggattataggcatgcgccaccacgcccggctaattttgtatttttagtagagacggggtttctccgtgttggtcaggctggtctcgaaatcccgacctcaagtgatccgccccactcggcctcccgaagtgctgggattacaggtgtgaaccaccgcgcccggcccgaagttattcctcttatctgactgtagtttggtattttttaaccgcatctctctgttcttcctctcccaaccccatctctactaaaaatacaaaattagccagccgttgtggcgcatgcctgtaatcccagctactcgggaggctaaggcag[148 bp omitted]gtgaattccccatttaggaagtgtccaagctcaagttgaaatgatggtacattgcggttcatgctgcaatgcctcaacccagttcctctccggacctcagtttcctcatttataaaatgggtgtggacgacgaggtcagatttaaaaaaataataatagtagttaataataataggccgggtgcagtggctcaggcctttaatcccagcactttgggaggccgaggtagcaggatcgcttgagcccaggagttctagacaatcctggggcaatatagcgagattctatctcaaagaaataatcataatcataataaaaataaatgaatagataagctgagacggactcaggcccagctcctgcctgcgatccctgcgggggccaccagggggcgcggcgcccctgcccaaaactccgccgtcggctctgaaccccggcggacgcgtcccgacgcccctggaagattctgcgccctgccggctcgccggcgcccgggagcccgggaggcgggtgtgcacgcggggtgtccagggcgcccccgatcgaggccccctcgccgtgcctcggggtagggggacggctgtgactcaggcgcgcgctcctccccggggccctcagtggtcgcgagggggcgcgcacggcctcgggaacccgcgcggcgccgcgtccatttttaccccagctccgctaaaaatagttgccgcgctccgagccgagcccgaaatagcggcccccagataaggcaggacgactcagcgcttccggggagcggaagggggagcgcgcggggggagcggtgctgggcgcagcccggccgagcaggcgccgctgtccccagcgcacccccactctgccctggcggtcacactcgcccccgactgcgaccccgccccgccgctagcctggctgccttcctacgtcccccacattgtatcctcatcccctgtcccccatcctcagcttcacctccattcctcatcataactcccccctcccctacacccccagcgatgtcccccactggtactcatccgcatcccccagcctgtcctactcctgtccctatttcccctctccaccctcatcgccaatctcctgtcgtcctgaatctgccccttaccatctctgtcctcaaggccaacctttatgggggcagagcagggcgagaggatcacagggagtcaggagacctgcgggctgagggctgagggctgggggtgaggatctgatttcttggtttgtttctactgtgggcaggggtaggcttagatctgggggttggagcatgggacacttcagtctggcctagtcttcagagctgaggcgaggcatggccagcatcacggctcattctgtgaccagggtcggggctcaggctggggaaggatgaccgtctttgtcaccaaatttgatcactgtgtcaccagagttagggctcagccttgagccgtttctttatttacccacctccactaatattttttatttcagacaaggccttgctctgtcgcccaggctggagtgcagtgttgcccatgctggaatgcagtgctgggatcttagttgactgcagccttgaactcctgggttcaagagatcctcccacctcagccttcctagtagctgggactacaggtgtgcaccagcacacctggctaatttttcatttttttgtagagacagagtctccatgccttgcccgccttgtccaggctggtcttgagctcctggcctcaagctatcctctggcctcctcctaggaaggcactgaaatgacaggcatgagctacagagcccgcctccactaagattctttcctcccttgcaagtcagtgattggacacaacagctccaggccttgggaacagtcagaactctgttccctgggcctaggtcttccctttgcactgagatcatctaagggcctccccatttccatatcctgagattctcagtgcccactccaagcatcagtgtcaggcctcaaggacctacactgcatgttctgggggtttaaagggagcacactgacttccctgagggtgacagaggtcagaatgagtgactaaggtcttgggcctggccctgaccctgcagtgggtgggagagatacccagttgaggcccaggtctccacccaggtagcagggtggatggcgggggggtcatccctgaggtgaaatgtgggtggaagatacctagataagtttcagagtcagtgcagagatggtaatttttaagtaacttctaaaattttcgagtagctgggattacaggcgcctgctaccaagcctggctaatttttgtatttttttgtagagacggggttttactatgttgtccaggctggtctcaaactcctgacctcaagtgatccgcccacctcggcctcccaaagtgccgggattacaggcgtaagccactgcgtccagcctaattttttttttttttttctgagacggagtcttgctctgtcacccaggctggagtgcagtggcgggatctcggctcactgcaacctctgcctcctgggttcaagtggttctcctgcctcagcct[211 bp omitted]tgaaaactgtttagaggccaggtgcggtggctcatgcctgtaatcccacccagcactttgggaggccgaggtgggaggattgcttgagcccaggagttcaagaccagcctcgacattatagtgagatctcatctctgggaaaaaaattttttttaattagccaagtgtggtggcatgcacctgtggtcccacctactcaggaggctgaggtgggtgggaggatcggttgagcccaggaggtggaggttgcagtgaaccgagatggcaccactacactccagcgtgggcaacagagaccctgtctcaaaaaaaaaaaaaagaaaaagaaaaaaagttttggtaactacaaaagggtataccttggaaaagtaaatttccctcccactctgatccccacttctcaatattaactattttttatgtatcttggccagtaggattcactgagctctcacgatgtccctggcctatgcaaagcccatcacagaaatgaagtggctggaatcattcagcactcagtgagtaggccagaccccattgctatgcccattttagagatgggaaaactgaggcttggagaggtgcaaggatgtgtccttttgagggcccggttctgaaggcttttcaaagttgaggcaaggaagtggatgagatcaaagaggcaaggttcaggccaggatacaaatcccagggagggtgacaggggtggggagtcaaggaaggctgcctggaagaagactaagggtagccaggaaggcatcttccagaaccttctgatggagggcttggatggaagtagataactctgtttggcaggctgaggaaccaccagcagcagggcgtggcccctcctcagacccacagcaccccagaggtatgtatagaagaagcaggctgcttaatgacatctcagggacacatctcggtgatagcacagccggcttagttatgacgtctgagtgatttgccaactgccttaagaccagcatccctagtcatgccccgcgggggggatgaagataagaggaagtgacaggccatcgggggaggaaggggagatgcagtcacacacagaccagggactcaggagctgagggatgtgtggtgccctctgcactagggaggggtctcccagctgcctggatgtgagggtccatcttattgatttgtctagtgaaggaggccaggctccaaggaggtatggctgtagtcagtcacactcagtttgggatggggtccgcccaggggctgcaaggatcagtcactgctgtgtccccatcacctaaggcagtaactgggacacagccggcgctccatacatcttactgaatgaatgaatcgaatgaaaagggtcagcaccgtctgggactcagtttaccctcgcggtcattgggctgcttcaaccaaggggatcgctaagaacacccctccccaccttgggtcccagatcccagatcgccagtgagtaagaaaacgggttcgcgccgttggtggactccgcccacttgtgacgtcacgagccgctcccccaggatcccgacccaggcgtctcccttgggatgggggcggagaggaacccgggagtccagactcaggccccgcccccgggagcaggcgggccgggcagggttacacaacccgtcgtcgcgtcccgagggaagtcgccggatgtcctggccgggccggggacaatgggcaaggagggcccctcccgcaggaacctggaagtggcaggggctccccctcttctgattcacccttgtttccggcccggtttagcctccttctccctggggatcctatctcctcccaactctaccctcctgtggccctgcagttcggttctttctccgaaccggcaaacctctctcctctacaccccgtaccccgtcctttcacaccttcccaacgccccccgaaactctctgccctcacactcatcgcttgtaattcccgaatcccctaaacttccagtgtccccggtccttccttcactcatccataccgggcccctcttcccaccccctcaactacccccactatcctgcccaggccctcccaatcccctccccgggctcccccaagctttcctcaatatctcccagccctccctagcccccgactcacccgcttccctccaactgaccccaatacactctcttgtcctcctaatcccagcctcccgcagttccctcctgtctcctcgaactgccccatgtccctacctcatctccccaaatcctgttccccatttccccccctcccccagccagccgcttcgccccccaccccggagcccctccccgcccctaggcccaaggccggcccgcgcccctcccgggcgcgctcccacgcccggcgcgggttcccaggccgcccccccgcggtggcccagagacccagtttgctgcggcaaaacactggtctccaggcaacaggccccgccccgccccagggccgccagatgaggctgggcggtcaggaggccaccgggccgggacggagcacccaggcctgcgcgccaaaccctcggccttggcccccagaggcctcagggcgcagaaacccggagactgaggcgcagcaaagaggagatacagagatcagggccccggagcaagaaattcggagacatgcgtggaggccgaagcaacagggaactgtcggggcgcagagatataaggaaagaccacgcgacagatcgaacaaggacggggcccagaaataagcacagaaataatgcagttacacacgggcaacaccgaggccggcagggacgcccctgatggcagaataatccatctttagtcctcaggacctttgcactcagttcgagggacttcccctctctgactctgtttctgtatttgtaaaatggggacattaatacgcagcgcttagcaaatcaggctgttctgacgattcagtgaattcgcagacccagagcttgtagcacaattcctggcatgtacactcatcattcattcattcaaccgattttttgttgttgttgttattgttgtctgagaggagtttcgctctgtggcccaggctggagtgcaatggtaccatctgggctcactgcaacctccgcctcctgagttcaagcaattctcctgcctcagcctcccaggtagctaggattacaagcctgtgcctccacgcccagctatttcttgtatttttagtagagacacggtttcaccatgttggccaggctggtctgaactcctgacctcaagtgatccacccaccttggccacccaaagtgctgggattagaggtgtgagccacggcacctgccccaatcaacaggtatttattgagcatctactatacgccaggcactggtaaagactgtgagaatgcagtattgaacaagacaaagctctctgttctggaagcttactctttggaaattggaagggggatgaccaacaataaatgaacaaatgagcaaattaagcaaattatatagtactttggaaagtagtaagtgctgggaaaagcagagacagggggttgggggttgctattttaaatgggatggtcagggaaggcctaaatgagaaggtgatgtttgagcaaagactagaagttggtttgggagaagccatgcagatatgtggcctaagcaagtgcaaagggtgtaaggtgaagacatgtctggtgtgttggaggaacacggaggcagctagtgtgggtggacagagagaacgtggggagggcactggagcagaagaggtcagagagactaagggctgatcccgcagggcccgatgggctgaggtgaagtcttttacagagtgggtcaggagctatgggagggttttgagcaaaagagggatgtgaactgtttcttatttgttaattaatttatttatttatttattttgagacagagtttctttcttgctgcccaagctggagtgcaatggcgtggtctcggctcactgcaacctccgcctcctgggttcaagcgattctcctgcctcagcctcccaagtagctaggattacaggctcgtgccaccacgcctggctaattttttttttgcatttttatagagatgaggtttcactcaacccaatgttggccaggctggtctcgaactcctgacctcaggtgatttgcccacctcagcctcccaaagtgttgggattacaggcgtgagccaccgcgcctggcttgttttttattttaacagggtcctttgggttgtaggtggggaatagactttggaggacaagtgtggagtcagggagaccagtcactgtcatggtccagttgagtccaatggtgacttggactaggaggtagtagggatcgattctggaggcctttgagttaagagaggcaaaatttgctgacaagcacattcatagcaagccatcagtagatggcagcactttccattatgttaggtggtactcaccacatccccataaaagttaacatccctattttacagatgtgcaaactgaggcccaaagaggtcgcttaacttgcctaaggtctcacggctcagtctagctccaaagatggtacccctctattgggacggctattcccaagcccacacacccgaacataacactctcagtgcctagatttacatctaaacctgtactcatccatgtgggccccaggactcccggagccatgtcctcatcagtcacatggagccggtgtagaaagtaggagctgggccgggagaggtggctcacaactgtaatcccggaactttgggaggccaaggcgggcagatcacgaggtcaggaattcgagaccagcctgaccaacatggtgaaacctcatctctactaaaaatacaaaaattagctgagcgcagtggcaggcgcctgtaatctcagctactcaggaggctgaggcaggagaatcatttgaacccgggaggtggaggttgcagtgagccaagaacgcgccattgcactccagcctgggtgacagggtgagactctgtctaaaaaaaaagaaaagaaaagaaagtaggagccagatggggagaatgctggcccaggacacttgcttagaggcaggttggcacaggcacagagggtccacccagaacctcccagcccagcatctggctcccacatccaatcacggcctaggcctggcacaccccagcactacgtgcagcaacatgtgaaacacagtcacgcatacacacggaaatgtggccttct[131 bp omitted]tgcaacgtctccctttcaggttcaagcgattctcctgcctcagcctcctgagtagctggaactacaggcacgtgccaccacacccagctaattttgtatttttagtagagacagggtttcaccatgtcggtcaggctggtcttgaactcctgacctcaggtggtccacctgcctccgcctcccaaagtgatgggattacaggcgtgaaccactgtgccgggcgtctatctctttatgtctctgtatctctctgttttcttttcttgtctctatctctgacctttgtctcactctgacccagctctgtctctctcacgcctccacactcaggatcctctaactgccgcagaatgactcttgtccctggctgtgtgtttccataggacctcacctattatgtaccatgagaacctggcctctggacaggtgtgtccagccccaggtcggcaattctggctggttgctcagaatcacctggggagtaactcacatagcataattctctgggcttctttctctgagatttttttttttttttgagatagtatcttgctctgtcacccaggctggagtgcagtggcacaatctcagttcactgcaacctctgcctcccaggttcaagtgattctcctgcctcagtctcccaagtagctgggactacaggtgtatgccaccaagcctggctaatttttgtatttttagtagagacggggtttcgccatgctggccatgctggtctcaaactcctaacctcaggtgatccacccacctcggcctcccaaagtgttgggattacaggcataagccatcgcgcccggtcgtctttctctgagattctgacccacagcttgtgggtgtggaactggaggaacccacctttaaaatactccccagtgactgggacccctgcctgcttgtactagttactgcatctgattttacagacagagaagagtcaaggcccagagagcagacagctcaccccaacatcacacagcagtcagctgcgaggggcttggtgctactcagatttctcctaagaatgtttggaaacaacctgagggagagttaagtaataaaggaaaatcacaaacagagacagagacccagaaagggactcacgggaataaaagcagaaagtgacagagatacatagagatgatgagacagagacagagagatcagagatagggttcagaaaaaaagaagagagaggctgggcacagttgctcacgccagtaatcccagcactttgagaggcggagatgggaggatctcttgagcccaggagtttgagaccagcctggacagcatagtaagaccccatctttatttaaaaaaaagtttttattaatttaaaaaaaatgcagagagagataaacacacatcagaggctgagaaagacaaaaagctatttgggggcctagaaagaccccccaccccgccccaggagagatgtattttcttttgaaggagacaataccgtctccttggcccatgctttaataggccctacttcccagaaacagccagtgccatggtttagcaatctcagccttaccaagccaggtctcctccccaggcttgatatgtaggatgcacattaaatacgtttatataacctgccctctgtgcagaatcaaggagctttacataacgtagccctgtgagtcatgcggcagacacggggcactgacctgacatgcccagtgagaggggacccctcgcccaggacctttacctggaagtgattgtgaaggataagggatcatgcatttcactgaagaggaagcagagggttagagaaggcaaggcacttacttggggtcacacagccaggattcagcacagcaaggattccaaccacatctgctagtgccttatcacgtgatcctttacagagtggaggaaacaataataaaaacacctctagtaatacaacgactgctgtgtattgagtgcaccgggctgcagtaagtactttacaaacaccgtcttatgtattccaaaacccagtgaggagctggacgctgtggctcacgcctgcaaccccagcactttgggaggccaaggcaggaagattgggtgagcccaggaggagttcgagaccagcctgggcaacataatgagacccccgtctctaaaaacaaaaaataataaaaattaaaaattaaaaaattagccagtgcctatagtcccagctagttggtaggctgaggcgggaggattgcttgagctcaggaagtgaggctgcagtgagctgtgatcataccactgcactctagcctgggcaacagaatgagaccttgtctcaaaaaaaaccaacaaaatggccgggcgcggtgggtcacgcctgtaatcccagcactttaggaggccgaggtgagtggattactggaggtcaggagttcaagaccagcctggccaacatggtgaaacctcgtccctactaaaaatacaaaattagcccagcatggtggcgggtgcctgtaatcccagctactcgggaggctgaggcaggagaatcacttgaacatgggaggcaaaggttgccgtgagccgagatcatgccattgcactccagcctgggcaaaaagagcaaaactccatctcaaacaaaacaaaaaaagcccagcgagttagggacagaatccagttattaaataacataattaaacctattttatacggagcacttattatgtactaagtgctttaccggatttgatggtcacaattctaggggtgggtgatgttatcacctccatttcaggaaggaaggaggctcagaggaagtcacaggtcaaggttccggagtgggtaactaaacccagtccttgctagccctgtatctctatcacctactcccatgcatacaggtccacaagcatgcctatgcacacgtgcaatcaatattgcactaacatctccaaacactctagttgaaatacccagagctcccgccttatatcttttctcttcctcaagaaggctaacccagcctccaatcccctaaaccttcatgagccagggaaggaaccctcttctttccctctaacgcctcagttccgccacgcggccggccgaggtcggcgctgtaaaatgctcctgctcctttaagagaatgaacagtccaggccgggcgcggtggctcacgcctgtaatcccaacactttgggaggcctaggcgggtggatcaactgagttcaggagttcgagaccagactgactaacatggcgaaaccccgtctctactaaaaatacaaaaattggtcgtgatggtgcgcacctgtaatcccaactactgtggaggctgaggcaggagaatcgcttgaacccgggaggcagaggttgcagtgagccgagatcgcgccattgcactccagcctgggccacagagcgaaagcgagactccgtctcaaaaaaaaaaaaaaaaagagagagagaatgaacagtcggccggcgttgcccggcagcgccgcgccggttgccgggcaacgtcaacaaacgacgcggccgccgtctccgtgcgcccgccccccccccccccccccacgcccgcgcagacgcggtgacgcgacggactgtggaacgccgtcgcctagcaacgcgagggctgtttgtcccgggctgggtggcgcggccgcacagggcgcagccaggaccggcccgggcggacagaccggcccgccgggagcccggggcggggggtggaggggattgcggtgatggaagcgggggagaaccgggttcccaaattaccggtttccctttagacagccgccgtctgttgtcgcccgctcctcctgtctgccccgggaccgcctccgctcgggtatctgtccgtctgcgccccctcctccccggcatgtccgtctgtccagcgcctcccgcgctgtggctgtctcatatcccccccaaaccatcacaaccaaaatagggacaagcacacacttcgctggcctgccgtttctgccttggactgccggatttccgggtgcattgttgcggttggggtccccaccaggggagacagacagacaaggggagacaatctgttcacactcaagccacagccccaaagccctcccgttcctttccccgctcccttggggttctcttgcctgtctttctcgagcctctttcaagagacaggcagcccgtggtccttccatcctgtgtccgggaagctgtccacagctgggaggttctaacaactcatccccaacacacactcccaacacccccccatccagtagcttcatgtgaccagggctggggcgaatctccgagcagagagaagaaattgagtgtgtgacagtgtgaatggatgtgactataggtgagcaacagtcggtgacaatgtgcacatctggtatttcctgtgtgagagcaaaactgcaggactcagtgagtggtttctgtggtttgcacttgtgtatctgggtgtatgggagtgtgtagccctgctgactgtgtagatatgaatgtgtgtgcagttgtgagtcttgcatgtggtcatctatgtgaaacaatgcctgtataagtacccatggatgtgcacggttttgcctctagccgtgcatttctggttctgtgtgtgtgtgtttctggttttttcgtttgttttttagagatggggtctggctgtgttgcccaggctagtcttaaactcctgggctcaagcgatccccgccgtctcagcctcccgactagtggggactacaggcaagcgccactacactcggctaattttctggttttttttgtagagacaggatcttgctgtgttgctcaggctggtctccaattcctggccccaagtgatcctcccacctcggccttccaccacagtgctaggattataggcatgagccaccgtgcctagccatgtgtgtttctggatttctgtgtgtaaccatgcaggtacctgcgtttgtgtacagattatttttcagagctccctccacagcattcattgcaatgtctaattatatatttgttcctttgtttactgtccatctcccccactggactgtgcaccctgtgagggcaggacccaaggctgttgtggtcactgccaggtccccagcaccaccctgcacagagaaggtgctcagtaattccttgttgggtaaatgaatcgatgactcttatgtccatgtcgagcacacacatccatgtaaccctgcaagtgattttgtggtactgggtcttctgtgtgtgtctagaagctgcgtgggccatagcacaggagggtctctgtagccatgtagctctaatttttggcaccccccacagtgcagggcacatatcagagcctcatggcacatatcagggccacgtggagtaggaggccaggtgcactggctcacacctgcaatcccagcattttgggaggctaaggcaggaggatcacttgagacctggagttcaagaccagcctgggcaacaaggtgagaccctgtctctacacataatacaaaaattaggccaggcgcagtggctcatgcctgtaatcccagcaatttgggaggccaaggagggtggatcacctgaggtcaggagttcgagaccagcctagccaacatggtgaaaccccatctctactaaaaataaagaaaaaaaagccaggcatggtggtgggtgcctgtaatcccagccacttggaaggctgaagctaaagaattgcttaaacccgggaggtagaggttgcagtgatccaagatcacgtcattgcactccagcctgggcaacaagagtgaaactccgtctcaaacaacaacaacaacaataaaaacaaaacgaaaattagccgggcatggtggtgcacacctggaatcccagctacttggcaggctgtggtgggaggatcatcagagaccaggagatcaaggctgcagtgagctgtgattacaccactgtactccagcctgtacaacagagtgagactttgtctcaaaagaaaaacaaaaaacaaa[134 bp omitted]cctctgcctcccgaattctcctgcctcagcctcccaagtagctgggattacaagtgcctgcaccacgcccagctaatttttgtgtatttttagcagagacgaggtttcaccatgttggcc[133 bp omitted]cactcggtttcctcatctgtcaaatagggagaataatagacccagtttatgggactgttgtgggagagtaaatgagttcatatggaaagcatttagaaaatgcctggcagaaaacaaacatttacaaaatacctgttttgattgttgtcagtattattacttcctctgtgtgtgtccttggatgtgcgtgtgcgtgtctagaatctgggttgcagatgcaggctttagctctgtagtcctgtgttactgggtacccaaatgccctgagtctcactttccttcctataccatgggcatgttccagaccttctccagggccagttgggactcaatgaagctgcatctggaacaccccaatggctacaaggcccagccgtggtctggtttcaggaaaggtaaatgaagggtgaagttgggacgggatggaattgaggttcaaatcactccatgggactgggaaagtgggaagtgaaagagggatgaaagagcgcatttgaagcaggcagactgagggtcagactccagaaaggacttcctcctaggactattttgg[132 bp omitted]aaccccatctctactaaaaatacaaaaattaggtgggcgtggtggcgcgtgcctgtagtcccagatactcaggaggcagaggcaggagaatcacttgaactcgggaggcgggggttgcagtgagccgaaattgcgccactgcactccagcctggtgacagagcaagactccctctcaaaaaaaaaaaaagaaagaaaaacatgagctgtttggagagctgcctggaggaagagaaaccagcctgagtttcacaggctagtggaatttggaggggggcaataatagcaataacaataggccaggcacggtggctcacacctgtaatcccagcactttgggaggccgagaagggtggatcacctgaggtctggagttcgagaccagcctggccagcatggcaaaaccctgtctttactaaaaatacaaaaaaaattaaccaggcttggtggtgtgtgcctgtaattccagctactcgggaggttgaggcaggagaataacttgaacccgggaggtgtgggttgcagtgaaccgagatcatgccactgcactccagcctgggcgacagagtgagactttgtgtcaaaaacaataataataataataataatgcactaggtgcagatactgataaaggctttgtgaggaattttctttctttcttttttcttttttttttgagacagagtctcactctctttcctggctggagtgcagtggcacgatctcggctcactgcaacctccgcctcccgggttcaagcgattctcctgcctcaggctcccaagtggctgggataacaggtgcccaccactacgcccagctaattttttttttttttttagatagggtctggctctggctctgtcatacaggctggagcacagtggcatgatgacaacccactgcagccttgacctcctgggcttaagtgatcctcttgcctcagcctcctgagtagctggggctacaggcttatttttttgtagagatggggtctcactctgttgcccaggctggtctcaaacttctgggctcaagcaatcctcctgccttggcttcccaaagtgctgggtttacaggagtgagccaccatgtctggccatttgaggaaatttttatttttgtctgtcttgtttcctgctctgtccccagcacctagagtgtgtgactgcagtgtgtgtgtgtgtgtgtgtgtgtgtgtgtgtgtgtgtgtaggtgtgctgattaaatatttgaatggctgattgaatgaacgaatgaatgtcatcctacaaccacttgtgagtcctggtcttaggggaaggctgggctggggccctggcctctgggatccctcttgtgccagtcccccagccctgctgttcccacagctctgtgctgaagagggcgtggagggggccagggaagggagtgtcaggcagccagccggctgcctgccctggacagcagcccagagtgtctgcaggagggagagggtagttcaggagcctgagtcaccctgggagaaaccccagccacatacctggccgctgacatcacccggccagggcacccccggcagcctagacaagctgactgaatcacaggcggaattcagccaccccgggcacgtggcctgctgtgaccccccgcaacacccccgagtggccgtctggctgcgggggttgggccgggcacacaggggtcagtgagggggcatggggcctgagtcagggacagggtggctacagccagagaccacccagccacaggcgtccatgtggggcaggaaggagaaagtttgggaaggagagcctgtggggaggccctggcgggtgaggaggaagcacgtgtgggtgtgacggggaggctgcggcttgtgggcagcggctgggcgacccacaggggtgggatggggtctgagtgtttgcgcagagaatcaccaaatcgtaagagacttggtcgtaagagtcagtcaggaggacaatggaatcaccaatgtgcttacacacgcaaaggcacacacgcacactcaacacccggcctggggaggccctgactccacccaccccaggccagcggggcctcactacccataagcctgcaagttccctaagggactgaggcctaagggacagtttcctcatctgttgagtgggggtattaacaagcattattaggccaggcacagtgactcgtgaggcagaggtaggcggatcccttggaggccagaagttcaagaccagcctggacatcatagcaagaccccttctctacaaagaaaaaatttaaaaattagctggatgtggtggtgtgcacctgtagtcccaggtactcaggaggctgtggagggtggattgctggagtgttggagtttgagactgcagtgagctattgattgcaccactgtactccagcctagacaacagaacaagatcctatagcaaaaaaaaaaaaaaaaaaaaatcactattattgtaatagctatgcttacggggaacatactttctgccaggtgctgttctaggcattctacattttttttttttaaataatggagatgacgtctcactatgtttcccaggctggtcttgaactcctgagctcaggctatcctctcgcttttttggtggctggcacgcctgtaatcccgacattttgggaggccaaggtgggtggatcgccggagcccaagagttcgagaccagcctgggaaacatagtgagatgccatctctaccaaaaaatcaaaaaattagctaagcatggtggctcatgcctgtagtcccagctactcaggatgctgaggtgggaggatcacttgaacctgggagatggaagttgcagt[131 bp omitted]atacacggtaagctttctcaagtgactctgttatgattcttagtactaaacatattattttccctttttttgtttctttctttcttttttttttttttttcggtgatggagtctcactctgttgcccaggctggagtgcagtggtgcaatctcggcccactgcaacctccgcctcccaggttcaagcgattctcctgtctcagcctcccaagtagtagggattacaggaccctaccaccatgcccagctaatttttgtatttttagaagagacggggtttcaccatgttggtcaggctggtctcgaactccagaccttaggtgatccacccaccttggcctcccacagtgttgggattacaggcgtgagccaccgtgcctggccaaatacacattatttttatccctaagtccaactaggaaggcctccaaaacagtcaccctcactgccttggtccagttctacttcttacctccctgcagtccttcctgctgcctcttctttggttatatatgtctgtagtagggagagagtgcttcagggactccctcctcattcataactcttcagaactcaatcatgattatctagatccacctccaccaggaagtcctcctggcttactccagcctcactaagcactctcaccacccaatgcctggagtggttgtagtcagtgagtgacacattgcacagtgtgtgccccctggattgggggtgggtgagagacagcccccacagtgagtggcacccctggccagggcctgggacaagtctgtatccaagggtggctctctgcttaggtctgtgtttgtacctgggtgtgtctgtgtctgccctactctgtgcatactcatatatgtgaacccgtgtgtgtgtgtgtagttgtgagtgtgtgtggaagaggctgcatggcagtggaagctaggtgtgtgattcgtgtatctgtgtgcctagagtgccttgttctatagatttggatgccactccaagcaagtcagtgggtctttttgttttttgttttttgagatggaatctcactctgttgcccaggctggagtgcagtggcacgatcttggctcactgcaacctctacctcctgggttcaagtgattctcctgcctcggccccccgagtagctgggattacaggtgcccaccaatacactcagctaatttgttgtatttttagtaaagatggggtt[133 bp omitted]acggtgtgactgtgagtgaaccttcgcacacgtgtctgtacggatatctaagaaattcttcaagtaggccgggcacagtggttcaggcctgtagccttagcactttgggaggcccaggtgagtggatcgcttgagctcaggagttcgagaacagcctgggcaacatagtgagacttcgtatctacaaaaaatatgaaaattagccaggcatgacagtgggcacctgtagtcccagctactacttggggggctgaggcaggaggatcccttgagcctgggaggtggaggctgcagtgagctgagatcgagccactgcactccagcctgggcgacagagggagaccctgtctcaaaaaaaaagaaaagaaaagaaaaaaagaagacattcttcaagtccacaactctgagggtatcactgtgagagcaggggtcctagctctacccatttgtgtgtgtgtggagatgtgtaagtctatgtagacaaaagtgtgtgtcatttactgtgtttggggtgtgaacacctatgtgatgtgtttgcacaactgcacgtgttttgttctgtgtgtgtgatcgtgtgttcaaataagtcatcttgtcgccgggcgtggtcgctcatgcctataatcccagcactttgggaggcctaggcaggaggaccattgagcccaggaggtccagactgcagtgagccgagattgcgccactgcactccagcctgggcgacagcaagaccttgtctcaaaacaaaagcaaaaacaaaaataaacaaatagtcatcaggtgcctgcacagacaaaggtgaaaggtgtctgcctgttgagatctgtggatagggtgtatatatggacatctcagcctgtctacg[137 bp omitted]catggcgaaactccatctcttctaaaaatacaaaaaaattaaccgggcgtggtggcacacgcttgtaatcccagctactcagggaggctgaggcattagaattgcttgaacccaggaggtggaggttgcagtgagccaagattgcgccactggactccagcctgggcaacagaacaagactccgtctcaaaaaaaaaaaaaaaaaaaaaaagaggctcagatatgtttctgtctgagagtctgtcagagtttaggaattagtaaatgaatgaatggtgaagatccatttactcaacaaacatttatttatttatttatttattgagacagagtctcgctctgtcacccaggatggagtgcagtggcgcaatctcggctcactgaagcctctgcctcctgggtttaagagagtcttgtgcctcagccaccaagtagctgggattacaggtgtgtgccactgcgcccagctaatttttgtatatttagtagagatggggtttcaccatgttgcccaggctggtctcgaactcctggcctgaagtgatctgctcacctcagtctcccaatatgctgggattacaggcatgagccaccagtcctgcctcatttattcttatattatattatattgtttttattttaaatttttttgtagtgacagggtcttactatgttgactgggctggcctcaaactggcctcaagtgattctcctgcctcagcctcccaaagtgctgggattacaggcatgagccactgtgcctggcttgaacaaatatttaataaccacctattgggtaccacgtgctatgctggggacaaggcagtgaccgggatggttttggccgagctttcacccagctcacaacccaatgagggagacaaacctatccccagacaatgatgagcccagattggcagagttggagggagggaccccaggagagggggccttgactcagcctggagatcagggagggcttcctggaggagaggttatgggagttaagacttggaggaaaagactatgagccacaggaagcgaagggaagagtgacccaggcagagggaaaagcacctgcaaaggcctgaagtccagggagagaggccaggcatctggaacacaacggggagaggagagacgagactagggcaccctcggagcaggtcgttcagggcctcaggagccatggggaggagtataatgcaggatgcaggggtactgggagggtcaagctaacagtgtccaatctgggttactctgcttccctgaaactccagggacatctcctccaggaagccctagggattgctcagtgtggagcggctcagccacccagtcacactcactattcaatgctgagcactgaggaggcagccgttactaaatcagcctggatttgccctcccagaggtcacagtcacaacagtcaaacacacacctgcacgtgcacactcatgaacgtgcccctcccctcctctggagcctcagaaacccacagaccttgttcctcccagggggtgtccctggggccaaagcttctgcactaccagggggcttgttggaaatgcaaaagatggctgggcacagtggctcacacctgtaatcccagcagtttgggaagctgaggcaggcagatcatttgaggtcaggagttcatttgaggttgggagttcaagaccagcttggccaacatagcgaaactctgtctctactaaaaatacaaaaaaattagccgggcgtggtagcacacgcctgtaatcccagctacttgggaggctgaggcaggagaatcttttgaacccgagaggtgaaggctgcagtgagccaagatggcaccactgcactccag[227 bp omitted]caggaaaattgcttgaacccaggggtgcagaggttgcagtgagccaagatggcaccattgcactccagcctgggcaacaacagtgaaactccgtctcaaaaaacaaaatacaaaaattagccaggcatggtggcacacacctgtaatcccagctactcgggaggctgaggcaggagaatcacttgaacccgggaggcagaggttgcagtgagctgagatcgtgccactgcactcaagcctgtgtaacaagagtgaaattccgtctcaaaataaaataaaataataaaaataaaaagatgaccacagcagatctgctggctctccaggcaattcgtgatcaccacgaattgagaagcgctgctctcaggcttaacccccctgtacctcagtttccttttctgtacaaggagatcaaaacagaatccatgtagaggactgacgtggagtgaggcttaactgagataatgagtgtgaaagtgctaagcacagcttcctaagtgcttgttttcagcagctcctcttcctcttttctatttttttatttttattttttttggggggggaacagggtctcgctctgttgcccaggctggagtatagtggcagagtcatagctcactgcaacctcaatctctcagggctcaagtgatgcccgtgcctcagcctcctgagtggctgggactacaggtgtgtgccaccatgcccagctaatttttaaatttcttgtagaggttgggggtgggtctcactat[138 bp omitted]aaatttcgaagaccgccatcactcaaccttcttgctctacagatgggggaactgaggaacagaggagcagaggtttggccagaggaaggtgggaaggacgtggtgtggctggccttcacagactctgccgggggctgtttacaggatactctgaggaaagccaggatgggcactgatacccacctccaccctgcgggaggcagaaggctaaggctcccccagccgtctcccccaagcagagctgagcccttgggagccagggcagagatgcaaccctctcccccatgctcaggtcctcctcctcctggaagctctccttccaagaggagcctcttattttattttttattattattatttttgagacaaggtctcactttgtcacccaggctggaagtgccgtggcatgatcatggctcactgaagccttgccctccccaagctcaagtgatcctctcacctcagcctcccaaatagctgagactacaggcacacgccaccacccctggctagtttttgtatttttagtagagatggggtcttgccattgtccaggctggtcttgaactcccgggctcaagtgatctgcccaccttggcctcccaaagtgctgggattacaggcatgagacactgagcctggcaaggaatgagccttatggagaagaacttgatttacccactccatgctctgcaggcaggtgtgtcatgtctgtgagtgcaggtgtgtgtgtgtgtgtgtatgtgtgtgtgtgtgtgtctccagggccaatttctcccttaggcccaggggcacagtgcctagggcccatgataaatttaaccgacccacggatatgggtcaggagggtatacatgtataaagttcaggaagactttgttttagtaacaaaacgagcatgtacaatctgtcaggagccttatgatatcttcccaccagtctcatgagtgggcactacatcttgttctcctttgtcgggtagggaaactgaggccccggatgtcctagctcaagttcaccaagctacttggtgatagaagcggaacataagcctaggccacctagcttctgggtctgcgatcgtgtgaggataaatgcccagtgtgttcgtgaacatgagcatccctgtgtgaataaattgacatacataaacccatttaataaatttcaaagccaggcgccgtggcttactcctgcaatctcagcgctctgggaggctgaggtgggaggatcgcttgaagccaggagtttgagatcagcctgcaacaaagtgag[137 bp omitted]agggtgaaaccctttctctactaaaaatagaaaaattagccaggcgtggtggcacatgcctgtaatcccacctactggggaggctgaggccggaaaattgcttgaatctgggaggtagag[132 bp omitted]tgaagcaggaggattacttgaggccaggagttcgaggttacagtgaactatgattgcatcactgcactctagcctggatgacagagcaagatcctatctcaaaataatactaatagttcaaggaacagactttgaagcctgacaccctgcatggtgttattccagctttgctacttacttgctgtgtgactctgggtgaataacttaacctctctgggcttctgtttcccttcctgtaaaatgatcatttgtacctcacaggagtgttgtgagaattaaataagttaatataagctcttgggaagaattagctcttgttatggttgtgtgaagagctttacacgagtccctctgcaggatgcatggttgttggtctgtgtgtgtgtatatatatatatgtgtgtgtgtatgtgtgtatctatgtgtatatgtgtatatgtgtgtgttgctctcttgatctctgagtgttgtgtgtgtgtcaatgtgtgagatcatatatgcacctttagtaaagatctaggggtctctgtgtgttttgggggtctgtacctgtccttggctgtacacctgaaccctacgtcttcttgtgtgtgtagggatgtgtgtcatgtgtgttgataaccatatgacagtgtgtgtttccacatgccagtgtgtgtctgtgaagctgtttctatgtggctgtgggtgattgcccacgcgtgacctggtgagcggctgtgtggaagtctgtgttgcctgtgtcgggtgtggagtctctggccagccagggtaggtctttgcatgtttcctttattccatggaggaggagatgaggggcttggatgagacagaagaatgaggggtcactccctgtctgatgctggggccgagtcactgcctactagtggctgctgtgtcatctcccagtctctgtccctccctcctggctggtggcagacagagggggcgtggaggaacagggcagggggtgggcttgaggctggacttttgtctggaaacttgaacctccacctatgccccccacgtccctctagtcttccacatctccctacaccctccctactattggggcagggaatcaggactccctgaaaattaagaaccatcgccttggctctgccacaggcttgctgtgtagcccggagacaggccctgcccctctctcaacctgtgaaattcaatgttttaaaagtgcttcttcctttgtgcccagggctgggccaggctgtgcactgggagggaagtgctgggttctctgaggtttgtgaaatagctggtagcacccttcccagtgggtgcttaagagttgggggctgtagcatctgaaatacccaagtcagtgcaggcatagtggctcatgcctgtaatcccagcactttgggagaccgaggcaggcggatcacctgaggttgggagttcgaaaccagcctggccaacatggtgaaacccccatctctattaaaaatacaaaagttaggccgggcacagtggcttacgcctgtaatcccagcatttaagaaggccaaggcgggaggatcacctgagtttgggagtttgagagcagcctgaccaatatggagaaactctgtctctactaaaaatacaaaaaaactagccaggcatggtggcacatgcctgtaatcccagctactcgggaggctgaggcaggagaagcacttcaacccgggaggcggaggttgcggtgagccgagatcgtgccattgcactccagcctgggcaacaagagcaaaactctgtctcaaaaaacaaaacagaacaaaacaaaaattagccaggtgtggtggcgcacacctgtaatcccagctactcgggaggctgaggcaggagaatcacttgaacccaggagatgtaggctgcagtgagccgagattgtggcactgcactccagcctgggcaacagagtgagactctgtcaaaaaaaaaaaaaaaaaacgtcagattcatgaaccccatttgctaagaagatttgctcaggtagtcacctgtacccctgtgagccaagattgcaacagtacatgctaagagcagtaagaaggagattgtaaagcttagaaagacctgacaggccaggcgctgtggctcacgcctgtaatctcgacacttcgggaggccgaggcaggcggatcaccaggtcaggagttcaagaccatcctgaccaatatggtgaaaccccgtctgtactaaacatataaaaattagcttgacgtggtggcccgcgcctgtagtccagcaactcgagaggctaaggtgaggcggaggttgcagtgagccgagatcgccactgcactccagcctggcggcagagcaagactccgtctcaaaaaaaaaaaaaaaaaaaaaaaaaaaaagacctgacaagtgaaagctactaatattgccattatcatttaaaaaaaccccagacacaggtttttcagggagtttcatccaaccaggcaggtctcagaaatcagaaaagaaatggaaagggtaggaaatctggagtttgacaattctgagtttgaatttcttgtgatgggatcttgggcaagtcatttaacctccctgagtatcatttttttcttttataaaatgaagatttttctctcttaaccttccagagctgttttaaggattacaaatcttctactgaaaggcgtagcacaggagctgtgcttggcaagtgccaaatacaaggcattaattattattattagaattaataataatatcccctccctcttacacattctttgtctccgggtggattaaaaggtggaaggagaggctaccaacaccatcagaagagaggcttctctctaagtttcatttcccatctcctccaaatccgcatccctcccaaacgccggacctgtaaggccagcagggtccaagacacacatcctttgcccagcggggaagattaaagctaaagctcagagagggaaaacatttcctaagctcgcacagcgaatcaggacagaaaccaggacgagcctcggaatccctccattacctccactttcacctgagcatcacagcccgctcgggactcagtttccccacctacgtgaccacaccacactaatcagggtctccttttggagatctgctcttcttctcgaatgggggcgctgcaccatcggtagaacagggtaggtgggggcgccagaggtgaaggggacctgcaggctggggtcttccccgcccgggtcagcggggtccctgcggggctagtctaagcgcctattattaccagcccccggggcggcgttgcactgcgcaggcgcgggcggggcgcgggcgcgcgcgcgagcgagcgagggattccctctgacgtcattgctaggataccaaacaaacactccgccgcgccggccgagctccttatatggctaattgcgtcacaggaactccgggaaggcggggccgggatcccctcccgccgagtggcccggaacgcaacccccgagacccccagggccccgagggtcatgcaagtgaccagatcgagtctagaacagacctcttgctggacagtgcgggactcgatttggcggggccggagatttggggaagtttgtccagcaaggggcgggtgacgtaagcaggggggcgggtcccgggcatataaatacaggctggcgggtctgtgcttcattcataagactcagagctacggccacggcagggacacgcggaaccaagacttggaaacttgattgttgtggttcttcttgggggttatgaaatttcattaatctttttttttccggggagaaagtttttggaaagattcttccagatatttcttcattttcttttggaggaccgacttactttttttggtcttctttattactcccctccccccgtgggacccgccggacgcgtggaggagaccgtagctgaagctgattctgtacagcgggacagcgctttctgcccctgggggagcaacccctccctcgcccctgggtcctacggagcctgcactttcaagaggtacagcggcatcctgtgggggcctgggcaccgcaggaagactgcacagaaactttgccattgttggaacgggacgttgctccttccccgagcttccccggacagcgtactttgaggactcgctcagctcaccggggactcccacggctcaccccggacttgcaccttacttccccaacccggccatagccttggcttcccggcgacctcagcgtggtcacaggggcccccctgtgcccagggaaatgtttcaggctttccccggagactacgactccggctcccggtgcagctcctcaccctctgccgagtctcaatatctgtcttcggtggactccttcggcagtccacccaccgccgccgcctcccaggtaagtttttgatagtaggggtgctgctttgtaggttttattttttaagtcaagggtgaaaagaataaaccccaacccccacaaaaaggcgcatcagaaccctagatctgagatggaaaaggctcacagcgcactttgcaaactgcaaagagtcgggagatgtttgcaattggttgcgtgcgtggagcgcaaggagggaacgcggcagggagggtaggctttggggcgaggtgggggtggggtgggtaatgcgctgctcaatgcaacgtgtatgcggtagcggggctgagaactttgagccggccccgggactgccccctgctcgggtcccagacctgaagctagcgcagttaggcaggtgggggaaatcccggggaagcttccagcagtctcttttcctttcctcctccttcggagcgcccacttcggtgccgggtcgccctccacccatcgggaagaggggcctcgaaccctcagccgcgctgcctccgcctcctgcgcggagacgtaacgggggacccgtgcgtaacggctgacgcgctggaatcctccgtctgacgcggggcacgcacggcgcgcggcgcccccttcgtccgccccgcccctgacgtcccgggagcgttctattttggaacgccggggccacgttgctaagggagggggcagcccggcgtttcgattggccgccggggcgcacgccttggccaatcagctttcccttcctatttgtagggtgcattttccttcccccctctctgtccccggaacccgtggttccttggcggctgggtctcttttcggcgcctctagaggcagagggaggggatccctgtcgtgacaagagcgcctgtctgcgacccaatggatctgcgaggcccttgcggggatctagtccctgggctctcaggagaagggggtgtctgcttgtgtgctggcgtttcttggagagatacggtggctgtcaccctcttctccaggcacacacagacacattcccactccctctgctcctcatgcccggttcctccggtgtgtcccaagacaggactagaaccgcgaaccgaagggcaaccagccaggtggtctccaggagctccgccccctctgggttcccaggactctgattggtcggcgagccagcccttccctcaccacgccccccgagagagtagttaagccttcagagcagttccaggagtccatttacgggaggggggagatgagcgctgctgaggcttgggggctcaggtcccgcaccattccccctccgcgacaatctgagagagctccagtggttacttttatctacctgtccgttcaccctaaactgtcactcgtcagtctcactctgagaagagacagtaacttgaaacgttgttctaaactcctaggcccgtcccccaaacacccttttgactgggacccccgcccctgcatgggacctcgcgcagaggggggtgtgtatgtgtgtgagtgtagaggaaggcttggcctaaggcctctccttctccctccccttgcctctggggtgggggtggggtgttgtggctgtgtgtgtggctgtggctccgtcccgggggttctgtcacccggctgtgtccagcctcctctccaccccccatacctaagagtcaccaacccggggtgtgattcaccacccgctggaaccgtgcaacctttccccgaggaagaaggaggaggtagaagccagttgagcagaaatcctctcattaaccactgcgtcacggtgtagtggaagggtgggtgttgtggctttttccctgtgacacacacatccacactcgctcaccctgtgctcactcacggggtcggtgtgtgttatgtgtgttgggtgtgtgtgtgtcggtgtctttgtttgtgtgtctacgcctgtgtgtgtatgtgtcaccccgtaggagtgcgccggtctcggggaaatgcccggttccttcgtgcccacggtcaccgcgatcacaaccagccaggacctccagtggcttgtgcaacccaccctcatctcttccatggcccagtcccaggggcagccactggcctcccagcccccggtcgtcgacccctacgacatgccgggaaccagctactccacaccaggcatgagtggctacagcagtggcggagcgagtggcagtggtgggccttccaccagcggaactaccagtgggcctgggcctgcccgcccagcccgagcccggcctaggagaccccgagaggagacggtgagtaagggacatcagaacttggcctgggtagggggaagcaagagaggcaggaagtttcttatgaatggaggggggctccactaaggcctcagtgttacagaaaccccaagatccttgctacacgagcgaggaccggaggcttgttttttggctcttgggggttctgaaagaagtagaggttcgggatgggtggaggagtgctgtatccccaaatctcatggcctctatctccctgactcagctcaccccagaggaagaggagaagcgaagggtgcgccgggaacgaaataaactagcagcagctaaatgcaggaaccggcggagggagctgaccgaccgactccaggcggtgaggacaggccctggggtgggagaggggatgttgaggggagctctctccccattctctgccccctctccacctgtacccttatcctgggttgagaactagacgttccacacatggaactaggtactgctgtggccagactgggtagcccagggcacaaacacagacccccatggacttaagtcaactcctggtcccccccccatttcctgaccccacggactactctcctagccttcatttcatcccaaggggccacatggggcccttgaggagaggggcgcccccatcatttctcccatctggtcttcagcaagtaacaacccattttgcctcagtttctccatctctgcaaaccctcatcaaatctcccgggctctttctacccttaacactctggaaagcctgtgaaatgaaattattccacctcctgccctagccacccacagctctcctggtgctggtggcatcccccaaaacccactcccttcctacgtcctcccttggtctgagagttccctgctgtatgcctgcagggtgagctgttactccttgagggaacaagggaattgtcaactttccttctctactttttctcttccccgggaggtagagagggaggggtaatagaagggaacacattaaaaacacataacagtggctcatgcctgtgatcccagcactttgagaggccaaggcaggaggattgcttgagcccaggagtttgagaccagcctgggaaacatagggaggacttgtctctaccaagaaaaaaaaaaattagttgggcatggtggtgcacaccactgtggtcccagctactatggaggctttagtgggaggatcgcttgagccgaggaggtccaggctgcagtgagccatgattgcactattgcactccagcctgggggacagagcgagactctggctcaaaagcaaaacaaaaccaaccacataacgattgttcattcattcaacaaacctcctgcacaccagaaacttccccataaacctggccccttctgtaccatcctttggacagatgggggaaactgaggttcctggaaggcaagacccttgccccaactcccatggccaccaggactccatctcaggaggtgttttttctcagcccggggctgccttccagcagcaagtccaagggagccatgacccgagtttcccggtcactgacatgcttttttctccttcctctctctcttctgtgacctggcctccctggcctcaggagacagatcagttggaggaagaaaaagcagagctggagtcggagatcgccgagctccaaaaggagaaggaacgtctggagtttgtgctggtggcccacaaaccgggctgcaagatcccctacgaagaggggcccgggccgggcccgctggcggaggtgagagatttgccgggctcagcaccggctaaggaagatggcttcagctggctgctgccgcccccgccaccaccgcccctgcccttccagaccagccaagacgcaccccccaacctgacggcttctctctttacacacagtgaagttcaagtcctcggcgaccccttccccgttgttaacccttcgtacacttcttcgtttgtcctcacctgcccggaggtctccgcgttcgccggcgcccaacgcaccagcggcagtgaccagccttccgatcccctgaactcgccctccctcctcgctctgtgaactctttagacacacaaaacaaacaaacacatgggggagagagacttggaagaggaggaggaggaggagaaggaggagagagaggggaagagacaaagtgggtgtgtggcctccctggctcctccgtctgaccctctgcggccactgcgccactgccatcggacaggaggattccttgtgttttgtcctgcctcttgtttctgtgccccggcgaggccggagagctggtgactttggggacagggggtgggaaggggatggacacccccagctgactgttggctctctgacgtcaacccaagctctggggatgggtggggaggggggcgggtgacgcccaccttcgggcagtcctgtgtgaggattaagggacgggggtgggaggtaggctgtggggtgggctggagtcctctccagagaggctcaacaaggaaaaatgccactccctacccaatgtctcccacacccaccctttttttggggtgcctaggttggtttcccctgcactcccgaccttagcttattgatcccacatttccatggtgtgagatcctctttactctgggcagaagtgagccccccccttaaagggaattcgatgcccccctagaataatctcatccccccacccgacttcttttgaaatgtgaacgtccttccttgactgtctagccactccctcccagaaaaactggctctgattggaatttctggcctcctaaggctccccaccccgaaatcagcccccagccttgtttctgatgacagtgttatcccaagaccctgccccctgccagccgaccctcctggccttcctcgttgggccgctctgatttcaggcagcaggggctgctgtgatgccgtcctgctggagtgatttatactgtgaaatgagttggccagattgtggggtgcagctgggtggggcagcacacctctggggggataatgtccccactcccgaaagcctttcctcggtctcccttccgtccatcccccttcttcctcccctcaacagtgagttagactcaagggggtgacagaaccgagaagggggtgacagtcctccatccacgtggcctctctctctctcctcaggaccctcagccctggcctttttctttaaggtcccccgaccaatccccagcctaggacgccaacttctcccaccccttggcccctcacatcctctccaggaagggagtgaggggctgtgacatttttccggagaagatttcagagctgaggctttggtacccccaaacccccaatatttttggactggcagactcaaggggctggaatctcatgattccatgcccgagtccgcccatccctgaccatggttttggctctcccaccccgccgttccctgcgcttcatctcatgaggatttctttatgaggcaaatttatattttttaatatcggggggtggaccacgccgccctccatccgtgctgcatgaaaaacattccacgtgccccttgtcgcgcgtctcccatcctgatcccagacccattccttagctatttatccctttcctggtttccgaaaggcaattatatctattatgtataagtaaatatattatatatggatgtgtgtgtgtgcgtgcgcgtgagtgtgtgagcgcttctgcagcctcggcctaggtcacgttggccctcaaagcgagccgttgaattggaaactgcttctagaaactctggctcagcctgtctcgggctgacccttttctgatcgtctcggcccctctgattgttcccgatggtctctctccctctgtcttttctcctccgcctgtgtccatctgaccgttttcacttgtctcctttctgactgtccctgccaatgctccagctgtcgtctgactctgggttcgttggggacatgagattttattttttgtgagtgagactgagggatcgtagatttttacaatctgtatctttgacaattctgggtgcgagtgtgagagtgtgagcagggcttgctcctgccaaccacaattcaatgaatccccgacccccctaccccatgctgtacttgtggttctctttttgtattttgcatctgaccccggggggctgggacagattggcaatgggccgtcccctctccccttggttctgcactgttgccaataaaaagctcttaaaaacgcattcgccaggctacagtgtttatttcctcctaacacccattgcctggcttccttttagtaagagaggatgaggttagattgtcgaaggactacacacacacagagatcatacacccatgcacacacacacacagacacacacctatgcaggaactccttctagtcaatgggtctacagcaggataaaaggaaggcagacagtcaggaggacttcctgtactcgcaggcagtgcctcctactagaaaaagtaagtggctacagctgggcgcagtggcttgcgcctgtaatcccagcattttgggaggccaagatgggcggatcacttgaggtcaggagtttgagaccagccttgccaagatggtgaaaccctgtctctacaaaaaatacaaaaattagcctggtgtggtggtgcacacctgtaatcccaggctacttgagaggttgaggcaggagaatcactttaacttaggaggcagaggttgcagtgacacaagattgcaccactgcactccagcctgggtgacaaagtgaaactgtcaaaaaaaaaaaaaaaagtaaggggtcagaaggttagcctgcaggtgtgggatcacagaggtgtcctagtgatggagcttgtatgctctatgggttaaaaacagacgctaaggagataaactatacacagaagaagcttaatgggctgtgcacagtggcttgcacttgcaatcccagctctttcggaggccgaggtaggaggctaggagttcgagaacagcctggggcaacatagtgagacaccccccaccccaacccatctcattatgttgagaaaaaaaaaaaaaagaggatcttgagaaacttgcacagcaaactactaaagaccactcaggctaggaatgaggcgtcatcttggattttttacaaactacaactacaaaaaacaattattttacactgaagatgtgtttccttttgttttccatatgaccactattggggccaacccaagactgactgaagcaaatatatgaccattttttttttttacacatagagtggagccatccccattgcaaaatcctagccgtctcttatttgcataacagcaagtcctctgggaattgaggtgagggtccaggggtcgctcagacgctttggtaaatcaataagcaagggaatttgtcatggtggaatccatttattaattcactcaaaaaaatgtgctaagcacctacccaactgtgctgggagttggggacactatagggactgagcctcaggtcttgccctcctggggctcacagtccattgggggacacacaccgttgccagtcagggacaacctaaagtggattgggtttgggaagcccatggggctagggaagcacagcagggacacctagcttggactgggagtcgggaaaaacttcctggcggaggggacagctgagctgagtcctagaggaggatagagagtatagaaagaaatagaaaaaggccaaggccaagaaaatagcacagccatagatctgttggtgggga[132 bp omitted]cgaaaccccgtctctactaaaaaatatatatatatatatacaaaaaattagctaggcatggtggtgggcacctgtgatcccagctactcgggaggctgaggcaggagaatcgcttgaacctggaaagtgg[132 bp omitted]gtgtggagagaggggttagtagagaccagattctgcaggtactataatgacattcccaggctaaggagtttagatcttttcttcagggcactggggagctattgcaggttttgaacacgagaggggcaggggcaggtttgtgatttaggaaagacccctctggccccagactgagcgtgactggaagggagaggagtgagactgagcaggagaccagggaggaagtggggtggggaccctgcagggtggggtgaggaggagtccagaacagggccagggacatgggacagagaggaggggaaggattcaggagacactcgggaggcaggacagttgggcttggtgagcagccggcttgggaaggaaaatacagggcagtaataaatagcatgggtcaagtggtctgagtgaggctgggagtggtggcacgcacctatggtcccagctactcaggaggctgaggtgggaggattgcttgagcctggaagtttgaggctgcagtgagctatgatcgtaccgctgcactccactttcggtgacagagtaagaccctgtctcaaaaaaaaaaaaaaaaaggaaaaaaaaaaaaagacactgcctatgagttaaccctgctctacaaggagcagtttttaaagtaaaattaaaaaaaaaaaaaaaaaaaaaagaaagaaagaaagaaagaaagagagagaaaaaagaaaaaaggctgggttgccttggacaacagacttcatctccctgagcctccatttcctcatctgtagaatgggggctgttaagaggagttgcaaggcttgtgcatgccagcagtaagtgcagagtgacggtgcaattatcattacccccatcatctttattggggtcagcctgaaccctcgatatcccataatattcacccccatccttcaagggtctgccctaatgttcccatgacacccgaccagctcagctctccttatgagagggcctcacttttctattccctttgcagccgttatcccctttgtagttgttaattaagtgtgtaattacatgatggcttaatgtttgtctcccccactgggctgactgcaccaggagaccaaggccagggctgtcacccaccgctgcgtcctcagcaaatgcttgtttgatgagtgaatgacagatgaacaaatgggcaagtatttgactgattaatcacggcatgcgtgattaaataaatgagtgagcaaacgactgaatgagtaagcaattgaaggggagagatctaggataatttccaaactgccaatatcccagaactgggtagatgactttttctccgtcttttggagtgggtttttatactccggagggggaaataagtaacgacaatcagagatcggagtgacagagaatgagtttgcgatgcggaaggccgcagcgacctctccaggtgcaggctggaggagcgcctcccgggcaacaagcaaaagaagtccggttcgataagtaagatttaaggcgcttagttactaccgcccgaaaggtggaattgaaccactctgtcgctagacagctacaggtttgaagcctgcaccccagaccactgaggatcatccgggcaggacaaccttattcccgcgcagctatataaggatcgcaaaagcttaccttttagagttatggtcgcgtcctttggaaaggtgtgagatggttgacttcaagggctataagttctccccactcatttatcgtgagagatgtccttgtaaaacgttgccttcacttcatatagtatgaatcatcctcgctccccaaaccgtctcatttacatagcgccacgcattctgggaagcagcgtttgagcacctggcaagctgttaaagggcccaggaccccctttttccaaaatgaaaagtcagctttttaagaggagagattcatgattcggcattcagaagcgccttctcggaaaattccgaattctctttctgcggaggagtggtgagtgggttcctgttagagtctgattcaccctggccccaaaggctctgagcaggcggctatagggctggtgcgacacctgctgttcttttatggaattgcgtaggccgatggagctccgcgttcattcaaacgtttattgagcgtctactgagtcccaggaactgtctcggtgctggtgacgacagacatcctgtcccgattgagtttaaacactagacataaccaatttctgcacttgcgttttatggttggagaaactgagacagactcagaaacggatagtaccatattccggttaaaacagcccatccacttagggaaatcgaacttgtgttacaatttttattacaaaaaaggtgattcttttttcttaaatttttacatatttaggaggtacaggtgccgatttctacatgcatatgttgattgcatcgtggtgaaatctgggcttttaggtgtactcatcacgaaaaattattcaatattctaagtcagtgattctttgacaataccattctcctgcatgaaactctcccatgacttccatttcagagtaaaagtcaaagtactcaccctgctttacaaatccctgtaatccagcccctttggtccctctgaccctgtctcacatactcctcttcccttggatattattggatttaggcacacagatgtcttgctgcacacatggatcatgctaccaccacagggactttgtgcttgccgatcccctagcctggatctcctcttcacatgttcccatggctcatcgcctcccttcactctgtcatctgatcaaatgtcaataccaaaaactcactgagtgaccagcactcagtggggccttccctgatcccagtttaaaatagcgagtggcggccgggcgcggtagctcacgcctgtaaccccagcactttgggatgccaaagcgggtggatcacgagatcaggagatggagaccatcctggctaacacggtgaaaccttgtctctactaaaaatacaaaacattagctgggcgtggtggcgggcgcctgtagtcccagctactcgggagcctgaggcaggagaatggagtgaacccgggaggcggagcttgcagtgagctgagattgctccactgcactccagcctgggggacagagcgaggctccgtctcaataaataataaataaataaaatagctagtggctgggatcggtggctcagggcctgtaatcccagaactttgggaggccgaggcgggtggatcacctgaggtcaggagttcgaggccagcctggccaacatggtgaaaccccgtctccacgaatgatacaaaaattagtcaggcatagtggctcacgcctgtaatcccagctactcgggagtttgaggcaggagaaccgcttgaaccggggaggcagaggttgcagtgagctgagatggtgccattgtactccagccttggtgaaaagagcaaaactccatctccaaataaaagtaataataataataaataaaataaaaatttttaaaaagcgagctctgtcactctatccccttaccctgctagacatttccccaccactctgatcaccacctgccattttctgtgtctatttgcttaccgtctgtctgcttctgtagaatatcagcaccatgaaactatgcactttatttttgatcattgctgtatctctagtgcctaaaaagtgcttgagaacatagcagatgttcagtaaatgtttgtggaatgaataaaagaatatcatcactgtctttttttcattcttcttccagacaggatcttactttgtcacccaggctggaatgcagtggcgcaaaaacggctcactgcagcctcgacctcccaagctcaagtgatcctcttgcctcagcctccctgggatgacaggcatataccatcacgcccagctaattttaattttttttgtagaaacaggggcctcactttgttgcccagactggcctcgaactcctggcctcaagtgatgcttctgccttgggctcctaaagtgctggaatttcacgcgtgagccacagcacctggcctcactatccttctttcagcctcagttttctcatttgtataaccagactagtacaactgatctcactggagaaatcatgatataaaattctgacactggctgaggcaactgggaggagctcagtaaaggctgtttctgctgggcacggtggctcacacatgtaatcccagcactttgggaggccaaggtgggtggatcacaggagattagaagttccagaccatctggcaagcatggtaaaaccccatctctactaacaattcaaaaagtagccaggcatggtggctcacacctgtgatcccagctactcgggaggctaaggcaggagaatcccttgaacccaggaggctgaggttgcagtgagccaagattgtgccactgcactccatcctgggcgacagagcaagactctgtcaaaaaaaaaaaaaaaagtttttttttttttggctggaattacaggcgcctgcccccacacctggctaatttttgttttttgtttttttaggagagacggggtttcaccatgttcaccagactggtcttgaactcctgacctcaggtaatccaactgcctcagcttcccaaagtgctgagattacaggcgggagccactacacctggccaataaaggccgtttcagtcttcaatctgttttgagcttggaggctttagtcattcccagacccaaaatctcaatcagaccctcttccaccactttttgtgatagatcaataaacattttgtcttatgggaagtttaactaagagtatctttagaaagttttggacaggcgctgtaatcccagcactttgggaggccgagatgagcggatagcttgagcccaggagttagagacaagcctgggcaacatagtgagactctgtctcaaaaaaaaaaaaaagaaagaaagaaaagaaaaaaagaaaaaaaaagtattccctctgcttggcaaatccagattcaagatatatcccctaaaccctctttgttttaattagatagttgctgctaggcacctctgtatacaaattctgaggatgtaaggactccttggaacaccgttatctgtctcctaatatgtgacgtgtgtatgacgaacaagtgagttttttttttttttgtttcttttttttggttttttgttttgagacgcagtctcgctctgtcgcccaggctggagtgtagtggcgcgatcttggctcactgcaagctctgcctcccaggttcacgccattctcctgcctc[215 bp omitted]caggctggagtgcagtggtgtgatctcggctcactgcaacttccgcctcccgggttcaagcgattttcctgcctcagcctcccaagtagctgggattacaggcatgcaccaccacgcccggccaattttgtatttttagtagagacatggtttctccatgttggtcaggctggtctccaactcccgacctcaggtgatccacgtgccttggcctcctaaagtgctgagattacaggcgtgagccactgcgcctggctgcacaaacattttaaacgtcaatatttttgtgtttatttttactattgtcttctatttctggcaagcaatactggtttctggtggcaaggtaacctttcttcttaaaatacatttgttattatattattaaatattaaaccaattttcaagaaaaatattagataaatagcagaacaggttgtagaaagatgaaggtcatgtggggaatgactgaggtttgggaaacaatattataactccttactgtgcatttattatatgccaggcccaatgccaagggctttacatgtaggtatagttatggttgacagttttcttctttttcttttctttttttttgaaacagggtcttgctctgtcgccctgtctggagtgcagtgacacaatctcagctcactacaacctccacctccttagttcaagtgattctcctgcctcagcctcccgtgtagctggtcttacaggtgcccaccaccacatccggtatttttagtagggacgaggttttaccatgttggcgaggcttgtcttgaactcctgacctcaggtgatccaccttccttggcctcccaaaggctgggattacaggtgtgagccactgcacctggcctctttttttcttacttaatttttttgtagagatgaggtctatgttgcccaaacttgtctcgaactcctggccttaagtgatcctccctccttggccttccaaagtgctgggattgcagacgtgagccatcgtgcccggcctaataagttttccatttgaggaaactgaggctttgagagatgaagtcatatgctcaaggtcatacagcgaaggggtagtagagccaggattcaaacccaagtctgtggatctttagacctcagtgttctcccagtctccccacgggtccctttgcttcatcctttccgagtttagttgtcttttttgttgttgttcttgttgttgctgttttttgatagagtctcgccctgttgcccaggctggagtgcagcggcatgatcctggctcactgcaacctctgcctcctgggttcaagtgattctcctgcctcaggctcccgagtagctgggattacaggtatgcgccgccacacccagctaatttttgtatttttagtagagatggagtttcatca[137 bp omitted]acagggtctccctctgtaactcaggctgaagtgcagtggtgtgatcatagctctctgtaacctcgaactcctggcctcaagcaattttcctgtcttagcctcccaagtacctgggactacaggcatgcaccaccacgcccggataaattttttttttttttagagacgggggtcttgttatgttgctcagggtggtctcgaacttttggcctcaagtgatcttcccacattggcctcccgaagtgttgggatcacagatgtgagtcatcatgccaggcctcagattagtgttgaaactggaagtccagggaggccctgtatttgttcccgaggcaatcagggtggggagacgtgggtggatgagagaagtttgtgaggcaggatagacacagcattgtgactgattgtttgtgggaggtgagtgtgtagaagtccagagccatacctgggtgtctggcctggtgacaccgtgggcagtgaaaacatctctgagttggaaatcaggtaggatgaagaagacgtttggttagatttagggtggaaggggcatccagaggccgttggacacgtgggtttgggctcagttgaggtggctgcacagtaggcagggtgtgggatccattagtgatgtctgccttgagcacaggcatgggaagtggctgccaaggcttggctaaccctggaatgggtggtctgtcagcatcttcccctcaatcatttctttcttttttttttttttgagacagaatctcgctctgtcgccgaggctggagtgcagtggcgcaatcttggctcactacaacctccatctcccagattcaagcgactctcatgcctcagcctcccgagtagctgtgattacaggcatgcaccaccacacccggctaaattttgtatttttagtagagatgaggtttca[141 bp omitted]gagctccttctccagagatggggaaggttctcctggagtgtcacttaagtgcctttcagtgcagaaaggtgaacaactggagggttctggaagcacaagaggcctcgggttttccacaggagtctttattacagtgtaaatccaagctcaggcctcccctgggccccatgcaaagccccggcgttggggctagtagcatccaggagacaccaacgcctcacggcgcctccagcggcgggtccggaagtgcagggtggtgccctgtctaggcaactacaagtcccagcaggccccgcggccaaggtgcctcgtctttcctggactcctggagcagagcctcttgggaaatgtagtcctggtcgctcaggtaattagcgcagagtccctagtgggagtgatcctgacacccaccgggaaaaggctcgggccgaggaggggggtgggtgggaacggacaagagatggagggggccagagggctgcgggggctgggggcaggcgtcctgcgggcagagacaccgttctcattcggctttggctttggatccggagactgcggctgctgcagaggccagggctccggtccctgggattttagctcggatcctgaaggagaaacaggtgggatcacgaggtggggcaagagacgcggggtgggcatctggggacaacggggaaagctgggtgggaaactgaccaagagcccgaagccagctcctgccctccacctagtggcctacattggaattgcctcctcagccttttcaaggggacattaccccaggagatttgcggacagcgagagtagaaaggaaaggttcccaagctcccccacttccccctcccatcgacctccgccccatgctcttacttagctttgatgtggctcaactgattggtcaccaaccccacatattggtcgatctgagcctggggagaccaaagaaaggtgaaagaagggattggaggggtttcttctctttagtcacataggaggctgcttcctccccaacctccaaattaggagttgtgaagagtggcccaccacgccacccccggctctaaacttcatagaatacattagatgccagagatgccagttatagggtcagtgagttgggccatactctgtatggagagtgatgtcaggtggaacgcacaagtatctggcagtgaggccgtgtcctgggcacgatggttaatctttgagtgagtttgcatacgtgtgtgttgtggggtagggtgagaacagaaggcactggcattggtcaccgagtccctgagtggattgatttatatactcgtgttttttaaaaaattatttatttatttgtatttatttttttgagacagggtctcgctctgtcacccagcctggagtgcagtggcatgatctcggttctctgcaacctcagcctcctgagttcaagcgattctcctgcctcagcctcccgaatagctgggattacaggtgtgcaccaacatgcccggctaatttttggattatttatttatttttttcttgttcttttttttttctttttctttctttctttttttttttttcctgagacggagtcttgttctgtggcccaggctggactgcagtggtgcaatctcagctcactgccaccactgcctcccgggttcaagcgattctcctgcctcagcctcccgagtagctgggattacaggtggacaccaccaagccttgctaatttttggatttttaatacagacagggttttaccatgttggccaggctggtctcgaactcctgacctcaagtgatccgcctgcctcagcctcccaaagctgggatcacaagcgtgagccaccatgcccagcctttttttttttttttttttttttttttttagatagggtcttgctctgttgcccaggctggagtgcagtggcatgatcacagctcactgcagcctctacctcctagggttcaactcatcctcttgcttcagctttcagagtaactgggactataggtgtgtgccaccacacctggctagtttttaacctttttgtagagatgggggtcttactatgttgccgaggctggtcttgaacttctggcctcaagcaattctcctgtctcaacctcccaaagtgccgggattacagttgtgagccactgtgcctggcctgatttaaatacagtttaattgtgagtcttggtgattccagcctgtgaaggacagagttaggactaactggcagggcatattatcatgtggctcccagctgtgctggagaaggggctgtcagtccatccgcctgtctctggataggatggatgtcagcagtcctgctaatgtcagtcttgtgggcaacagccatcccactcttgattttatttttatgtttttattttttattttttggttttttttttttttttttttgagacagactcttgctctgtcacccaggctggaatgcagtagcatttaactgacatgtcagttaaaatcaagagtgaaggccaatctcagcactttgggaggccaacgcgggcagatcacctgaggtcgggagttggagaccagcctggccagcatggtgaaacccggtctctactaaaaatacaaaaaattagccaggcatggtggcaggcacctgtgatcccagctactcgggaagctgaggcaggagaatcgcttgaacctgggaggcagaggctgcagtgagccaagatcgtgccactgcactccagtctgggcaacagagcga[137 bp omitted]atggcaaaactccgtctctgctaaaaatacaaaaattagccgggcacggtggccatatgcctgtaatcccagctactcagagattgaggcaggagacttgcttgagcccaggaaacggaggttgcagtgagccgagatcacaccactgcactccagcctgggcaacagagcaagactctgtctcaaagaaaacccaaaacaaaacaaaaacaaacaaaaagcctgtccctggctgatgctgataagacatgttacttagactctggttgtattgggaaggtgctgcagccaggacacctgtgtctggccgggacatctgtcaatgggaccccggttctggaaggagatggtcagacccccatgtttagctggggtgctgacaactgagggtgtcacactcacctggtgctgccggtacagcagggggatggtgaatagaccaatcactcctgtgggtacagagatgggggcgtcagggtgttcccaagagatgaacagttccatctggagccctgtcccccaccagactccaagtccccatttgccccttacggccttcccagctcacccagaatgagaagagtcaaaccattgaagatggcacccacgaaggtcaagatgtagaagaggagggccagctgggggtgaaggtcagggtcagcagagcccaccgggaattccctctcatgctgtgaatttacccaacagtcgccctcccaccccctagccatgcagaggtgaatgggggaacccaggaggggctgagagctccaggccaccttgagggaatccacgaggtcttctaccaggaagaagtgccgcagctgcgtggccgccgagaccacgcgggaggtgatctggtgggacaaacgttccgtctgctcccgagtcagggtgaggtccacatccaggtaggccctgcggggacaaaggagtgtggggcgactcagtgggtgaccagctcagactggtgcaggggcagctgaaacaagggagaggaatggcggttgggagaagaccagagttaggactgaggggcagctcagaggaatcatatgtagagggctggggtcagggtcagggtcaggggaagggatcgaggatgaagggtaccaggttaggatcagagattaggattgaagggtaggttaggggatcgggatgaaaaatgatcaagatgagtcggggtccgggtgggagtcggtgcctgatttgaggtcgtgggtcatgctttagggtcaggacaggggctcaggtcaggggccgggggttctcactggaaagggttggctccatccccccggtgcacggcctgcagcactttgcggtaaaccctgagagagatggtgccgcagagcagcaacagagccaagtgcgcggccacggacacgatgctaaagtgcaggaggcagaggagggagaccatcaggcctgtgaagaccactcctgacgtcctcgtgtccttccagtacagcaggtccgccactgtggaggggtggggggcatcagggcttgtacctgacctggctggtctcctcacctccctttccctgtcctacagctgaaaatgacttctcgacacacctgtttgagcataacctgatttcctttttttttttttttttttgagagacagggtctcactctgtcacccaggctggaggcagtggtgcaatcatagctcactgcagcctcgatctcctgggctcaagtgatcctcccacgtcagcctcctcagtagctgggactacaggtgtgcaccaccactcagctaatttttgtttttgtttctgtttttagaggtaggtggctctcactgtgttgcccaggctagtctcgaactcctggcctcaagttatcctcctgcatcagccctccaaagtgctgggattatacgtgtgaggcacagcacacagcccgatttgcaattttttaaaaattattttattttatttttatttttttctctattgcccaggctggagtgcagtggcgcaatcacgactcactgcaacctccgcctccctggttcaagcgattctcctgcctc[134 bp omitted]gcctcccaaagtgctgggattacaggcatgtgctaccgcgcctggccttaattcattattttaaagagctgcatagtattctgtgttgtggctgtgctcctgtgctctcattcattttatttaaccatgtacctattgctgggtcattcagtttgtttcctaaccccttcaccgcaagcagggctgcaagcaacatcctccaacagatattctcacctcctggagtgactatttctgagacagattcccagggtggaattgctgggtggactggttgtgtgtctgtgtgtgtgtgtgtgtgtgtgtgtgtgtgtgtgttttgtttttgtttttattttttttgagacggattctcgctctattgcctaggctggagtgcaatggcacaatcttggctcactgcaacctccgcttcctgggttcaagcaattctcctgcctcagcctcctgagtagctgagattacaggagggctccaccacacccggctaattttttatattttggtagagatggggtttcaccatgttggccaggctggtctcgaactcctgacctcaagtaatcctcccacctcggcctcccaaagtgttgggattacaagcgtgagacaccacgcctgaccttggtttgtttgtttgtttttttttttgagacagagtttcgctcttgttgcccaggctggagtgcaattgtgcaatctcggctcactgcaacctccacctcccgggttcaagcgattctcctgcctcagcctcccgagtagctgggattacaggcatgtgccatcatgcctggctaattttttgttatttttagttagagatggggtttcaccgtgttagccaggatggtcttgatctcctgacctcaggtgatccacccaccttggcctccaaaagtgctgggattacaggcgtgagccaccacgcccggccacattttttttttttttatttttagaggcagagtctcactctgtcaccctggctggagtgcagtggcgtgatcatggctcactacagcctctacctcccagagtcaagcaaacctcctacctcggcctcctagcagctgggactacaggtggcaccacgatatcgtgctaatttttttttttttttttttggacaaagtcttcctctgtcacccaggctggagtacagtggcatgatctcagctcactgcagcctctgcctcccgagttcaagagattcttgtgcctcagcctcccaactagctgggatcacaggcatgagctgccatgcctggcctggctaatttttttttttttttttga[134 bp omitted]catgcccggctaattttttgtattttagtagagacggggtttcaccatgttagccaggatggtctcgatctcctgaccttgtgatctgcccacctcgacctcctaaacctggctaatttttaaatgttttgtagagatagggtctcgctatgttgcccaggttgaattcctggcttcaagtgatcctcccacctcggcctcccaaagtgttgggattacaggcatgagccaccgcgctcggtcatatatatttttttaatgtcataaattttgaaacactgcttactagtaagaccataacagttcttatttccacaagaagcaagagaaagatcttttcccagcatcctgccctgcagtgggttgcagttctttttaacttttgccaatctgtcaggtgtaaagtgatatccccttgatacccttagcaacacatgtttctaagtcctaaatgtattaatcacgccatactcctttccagggcctaactcaaatttctgacccctttctgagaccctaaaacacacctcctaaacccaacctcagccctgaccagtgacctttgtaccccaaccttcatctcatctgtctaaactttaggctcactcctgtaatcacaacactttgggaggccgaggcgggaggatcacctgaggcctggacaacatagtgagaccctgtctctacaaacaaaataagaaaattagcagggcgtggtggcctgtggctctagtcccaactacttgggaggctgaggtgggaggatcacttgtgcccaggtgttggaggctgcagtgagctatgatcccaccactgcactccagaaagggcgacagagggagactctgtggcttaaaaagaaaaagaaactttagtaatctgctttcctttgagtcctgaaaaccaggaactcagtacctttctatttctttccagatcctctctatcctcccacactccctccaactgacccctccgaccggtccctcttagaggctcacccctcacttccgtctccttccaatgcatctcctctcatttacctccaaatagggcagcccctccctccccatagcagggccctcccaggcaggctcctagtggccggcgccggtggatgggggaggggccaggtcgcctgaggcgggggctaagtttaggcacgctggggggagggggcctccccgcagctgttctggcccgtctggcccctgagtgacagcgctgcctggggccgaggctgggggagggggtcctccctgctcctgggccccaaagtgctggctcgaaggagaagggaccccatgctccctctgggtcctccctatactgcccctcggccccctagccccagcctgcagcgctgcggaagcagatcagtaataaaaatgctccggatgtgcaggagataagggcgagtttggaccccgttccgccgacctcagcccccgtccagcccgttccgcaagcccacctttactccccatatcggctccgagtgagaggctggggacaccgctgcttctcggggattttgcccacttcagtagaacccggaggacaggagtagggggggtggggcccctttggacccagccaatggctgtccacagaggtggggacaattccaaaattggaaccgtcttgtaaacagccaaaagcaatgatgtctttaaccattccatagctgttcctggaggcggagcatattttaaagtaaggctgggtcattttacaactggccaatagatgtggtcaggaaaaagagggtttttgtttgttttttcaaatagagatcgagtctccctatgttgcccaggctggtcttgcactcttggcttcaaaggatcctcccgcctcggcctcccaaagtgtttaggattacaggcatgagccactgcgcccggccaaaaagaagagtttttaaaaggcacagagtttacttataaatattctacggccacatctaaataaggagagaactgtattttttcagggatttggcctgtccaaaatcagccactaggaggag[144 bp omitted]gcctcccgagtacagacggggtttcaccatgttggccaggctgatctcgaactcctcacctcaagtgatccgcccgcctcggcctcccaaagggctgggattacaggcatgagccaccgcgcccggccggggaaatttttttaaaaagcggagtttatcacgtctagccagatgtgatatcacgtctatctcttcccttttccactatgtactgttcctttgcgaggttggtccctttaattcaaaatcctctcaccttttgccttctgtgggccaatgcagcatcttcatacacgttgcttacctagaaggcgtggctccaccgtgaattctaattggtccgtgctatcgaggcactgtccccttactggctctcgctccagtggcccccactgcttttcttcctcttccagcaatggctcttcgggcccagagttcgaatctcgcgatcgggatggggacggagtaccggcctggggtgtcccagagcccggactgagctggggagtcaagacctcgggcgatgagggctgagcaagtcggagtcgtaggtccagttctgatacggtagagagaggaggccgtgagctttcttcttggaggtgccccaaggagaaaccacccacccctcttggctttggtcccagcacctcggacatctcaccttccccagcttctcctgtctccaatctgttgggttcttggggttcttcgtcttccagcggggtggagctgctggtggaagagtcctccccggatcccgttccccgggccacccagcccagatggtccaaccgaagcctcaggtcttccagagggcgctcggatggaggcgcggtgtcaggatcaccccgtcgtccaggctccggggattggctcaggctggggatgctctccaagctgtcgcccaggctgggctgagggtgctggtctcgtggttccgagactgagcggccctgggggcgggggcggcgggcagttgaatccctgcggcccccggagcccactacaccatcaaaggcgatgtaggagaaggtcagctcccggggggtgccccagtcctgcgacgtggtctcctcctcgtcctcctctgagaattcccgggctgtgtgcagctctcgaaaatcagagtcgtcgttccctcctgcagtgggtgaaggagagccttgtttccctcagcaggtccctgagctgcccagccctgagccccttcacatgctccccaccacttaccttctgtggaatcaggagttgaggaggctgtagacggagcttcttctgcgagagggaaagaatcgaagactcttagaagcttagactgtccgaatcacagaagtgtcccagtcctggaatcttagaatatttgaatcacgggatttttagaacattctgcacacagactctaaaacctagcatcactgcctgatgaagctcagagtctttgaagtccaaatccaggaatcttaatcttagagtcttcaaagtaggaatcttaggaggtttcaattcattcattcgttcaacaaccacttattgagcacctactatgtgccaggcactgttctaggtcctggggatacagctgtgaagaaaacagacaaaatccctgccctcctagagctgacactctttgggatagacaaacaataaacaagtgaatatatgacgtcgggtgcagatgagcatagggagcaaagtaaagaagggtaggggaagagaaagtgaaggggtgctgtttctcatagggtggtcaagaaggcttctctgataagatgacgtttgagcagagatctgaaggaagtgaggaagccatgcagatgttcagggacgtcttccaggtagagaagaaagccagtgcaaaggccctgagccaggcaccatgcttggcatctgaggaactgagaggtgcgaagatatgactggagaagagtgactgaggaggagaggagtgggaggtgagaacagagaggtaagggcggtggggagagacagacgaggtggtcctccctttgtaatctgaagttaacgacaagatcatagaatgttgggatgatactcgaaaatgctgaaatcaccaattcttagaattttggcatctggacacgcgagacatggaaatggctagatctaagggtgttgaaatccccagctgtcagaacccccatgtgtgggacagagaacggtagacatggactgttatagctgtgagctcagagattgtgaggctaggcgttttcagctgggaatccagccccttagagctagttcagagctttgcacatagatgatgctcaatgcggtttggaaattgaaatctgacgccctgtgccctcacctcgtttcctcagctggggaataggaggcctggaatggtgtgggtcttccccaggattaccattaaccagtggtaaagaccgctaagaacccatgagtccttgcccccaaaccacggatggctgttttcccgggacagggttggacagtttgggcgaggtcggggctgcctcttggacagaaaacggggatgggatgcgaaggcaagtgattgggagccagacccctgttttccatcctggctctaccctccgttcaaccccctccccgccagctgcggccagcaccagagccaggggacagctccccgcgcgcgtcctcgctcccgggcggggccgggcggtacgtcccagagcgcagcgcgccccccgcctgctgtctcagtgccccctcacctccgccctgtttcgtccaggtcctccgggtcaggctacccccgtcgccgccagagcgcgggggaggggagagcttcctttgtctcctatgcctcctccccccatcccggctctcctgcgggcaagcgccgaggggacaccggggagtaccccacctgaacctctggggcccacaccaggccccagtcttcctctactcactgcagtgggcgaagaccggcaggacctgccccatggcccccctcgggcctgcatcgggacccccgcccactccggctgtgccgccctgggcccggggtcgcgggcgctcatctccgccgcgcccacgacgccgctgccattctcgccgcctcctcctcccgggctgctccagccgccgccgccgccgccgccgccgccgccgccctggtgctcggctcggcgggggcgggcggggccgaggtggggaaggcactgcagcgcgcggccgggggcggggccagaagacgggcggggcggtaccagagggagggtgaggggcggggaaacgccgaggatcaggcggaggggcgtggccttcttactaaaggggcggaaccaagagggtgggctacggagccaggaaggaggggaaagcggcctgaagggcggggcctagatcgcagagggcgcagcctttaggggaagagggaaggaggcctggagtctggcgagggacttgggagaggatggtgaacgagccacggcagagaggatgagagcgtggatccctgggtgggttggggtggtgctcggggtgccattgaggagggggtggaaagattctaatgctctgaggtagggtccgagcctagatttgcagagggagcgagaaagggggccgaatgaaacgattcagaaacttttggggcacgcggaggagctcaaacgtgggcagggctaaagcaacagggaattattcaaatataactgggtggggtcggattccaggcgattccaggtctgcgaaaattagaagggtctggagctgtgtgcctgaatcctggatgggcggggcctggaagagaaaataagcgaagccccagaggggaggggtcgaactaaaaacagtaaagaaaaaaaaaatatgtatatatatatatatatatatatatatatatatatatatatatctttttgagacagggtctcgctctgttgcccaggctggagtgcagtgatacgatcacggctcactgcagcctcgacctcccgggctcaggtgatcctcccacctaagcctcctgagtagctgggatcacaggtgtgttccaccgcgcctggctaaatgttaatttttgtagagacggggtctcgctatgtttcccaggctggtctcaaactcctgggcttaagcgatccgcctgcctcggcctccctaagtgctggggttataggcgtgagccaccgcgcccggccaagtatggtatttacaggttttgaggctgggggctgtaccactgaggtgggaggagcttggactgagtgttgtgttgagaacacagattctagaattagtttccctggaacaccggttacttctgtgactctgtttcttcttccatatgtaaactggagatgatgatgtataacagtgtgtgacacattagtactatgtaatagtttgccactggtacagtattatcttttttctttttttttcctgattcagatcccaaaccccgctttgtaggtgcaggaaacaggagacccagaagtgtaattccttctagtgacccgcctaaagagcaggtcaaaggacaggaaggagatttagatggtttaaaatctcacagcggaggggattaatggagggggcgggcaggtgtacagggtggagccttcctgatcccagggctgaaggatggcggtcctggcccgccagctgcagcgtctcctctggaccgcttgcaagaaaaaggagagggagaaggaggggagggaggaagaggaggaggaggaggcggggcgcagggcccccgaagggcctcggtctctgttgacagcgccgcgccgcgcccagcggccgcacgggggtgccgaggcgtctgggggcctgcgcttcggggcgagcgcagcgcaaggctggcgcgcgcgcatggaggatgctcactgcacttggctttcgttacctggtctgcccccgggctgggccttgtttgccgtcctcgacggccacggtggggctcgagctgcccgcttcggtgcacgccatttgccaggccatgtgctccaggagctgggcccggagcctagcgagcccgagggcgtgcgcgaggcgctgcgccgagccttcttgagcgccgacgagcgcctgcgctccctctggccccgcgtggaaacgggcggctgcacggccgtggtgttgctggtctccccgcggtttctgtacctggcgcactgcggtgactcccgcgcggtgctgagccgcgctggcgccgtggccttcagcacagaggaccaccggccccttcgaccccgggaacgcgagcgcatccacgccgctggcggcaccatccgccgccgccgcgtcgagggctctctggccgtgtcgcgagcgttgggcgactttacctacaaggaggctccggggaggccccccgagctacagctcgtttctgcggagccagaggtggccgcactggcacgccaggctgaggacgagttcatgctcctggcctctgatggcgtctgggacactgtgtctggtgctgccctggcgggactggtggcttcacgcctccgcttgggcctggccccagagcttctctgcgcgcagctgttggacacgtgtctgtgcaaggtcctgggggcgtggcgtggtacctttggggcttggtgcagcagagggagagagcctcggggttttggggaggagggctttgatagagaggcaagagtaaagctagcaaaggaggggataggactcaagcgaagggcgtggcctgaagtgggcagggccaaaatacaggggcggagcctgagggatgctttgaggcacgggagagttagtggaagggacttaagagaaagggcgtggtcttttggaaaggggcgattctgggtcgtaggagccgggccggaagtattgattagtgctggaaggtggaagagcaggtaaacatcagagcgggcggagctttagggaaaaggcattgttctctcaattgggagcgcctaggaccgggtttggtcccagtaagagaggattggcaggtgggtgggacgcgaaagaaatgggcataagtagaatgaagtgggggacttgaacctggggattgttgggaagctctgccttggactctcccccaccgggctcctttttctccaccggcttcagggcagcctggacaacatgacctgcatcctggtctgcttccctggggcccctaggccttctgaggaggcgatcaggagggagctagcactggacgcagccctgggctgcagaatcgctggtgagcagactctgggggcccagctggaggggtggttggccagtgaaggctgtgccataactttttctttttttctttttttttttgagatggagtcttgctctgtctcctaggctggagtgcagtggcgtgatcttggctcactgcaacctctgccttccgggttcaagcgattctcctgcctcagcctcctgagtagctgggattacaggcatgcacaatcacacccagctaatttttgtattgttagtatagacggggtttcacgatgttgtccaggctggtctcgaacccctggcctcaagtgatccgcccgccttggtctcccaaagtgctgggattacaggcgtgcgccactgtgcccagcctaactcttgactctttctcagaactgtgtgcctctgctcagaagccccccagcctgaacacagttttcaggactctggcctcagaggacatcccagatttacctcctgggggagggctggactgcaagtgagttggggtgaggaagggtggggtggaatgagggtggggtggaaggaggagagtcccctcctgagggccttcctgtgctctccagggccactgtcattgctgaagtttattctcagatctgccaggtctcagaagagtgcggagaggtaaggatcctgtgttctccagtgtttctcttaggaggggacgcccccccgcccacccctcttagtgacagggaaattgaagccagtgaggataagggatttgcctgatatattttattcctcttttctcttctttctttctctttttttcttttcttccttcctttcttttctctctctctttttttttagactgggtctcactatgttgcccaggctggtctcaaactcctgggctcaagggatcctcctgctttggcctcccaaagtgctgggattacaggcgggagccactgcaacccagccagcttgctatattaatacattcctactcccagccctgaagcattgtgcaaggcatgaggagggagacgcagatgcagagaagagactgtgattcccctccaagaaatgtgagccggcaacgctctgcagtgccccatcagcccaagtgcttcccacatccaagaataagatggaaacattcagggaatgctaatgaccaattctaaggcctagacgcacagcagataccatcaggacatacatgagtatgatccaggtcttagacaagagaagctgtaatggggcccagatagctaaggagaatttggagatatccaaagatgtatagtggtggaccaaggcatggagtggcatcagggaagaaatgggagggaggaagctgggtttagagccccaaggcctttgcatggcagaggtgggagtttggtgattatcatgttgatgagggaggattgttgacaatttctcagtagctgaaggaggtatttgtcagttttctttgagtcgtgagagatggaagcccaattcaagctgggaaaacaaaacagggaatttactgggccatgtaattgaagagtttagagtcttaaggcatggctgcatctagttgtcagatgatgtcatcatgaatggtctctttttattttctccgagttggcttcattacctttcagggtctcctcctaaggtagcggagacttgcagctccaggcttacaccccagcagcctgtcctccccagtggagaaagtttgccaatttccccggagttgcagcagtggtctttgggggctggttctcattggccacaccaggtcacatgctgaccagtcactgtgtctgattggccaggctggggtcgcacttggggttggggtccactccattcaaaccttaatggattgtgagatgggatatggtggtccctcaaaggaaaaggaagaggtgccaggagacaagacagaatttctcattaccttctcccacattttgtgttacagaaggggcaggatggggctgggaagtccaaccccacgcatttgggctcagccttggacatggaggcctgacagctgttgtcctttggggatcctttgcttctctggggcctcaacagaactaaagaagaaaaccgaccctttccccaactacatgtaccagcggaaggaaggaaggccaatgtaggaacccaaaatgcttatttcttcttctcttacttccctctcacagaaaagtcttacgaatggggaaattccaccaacatccagaccaaaaagaaaaaagcccaaatcgaaaaaaaaaaaaaaaaaaaaaaaaaacaaaaaaacccaaccaaatgtttttgaaatattcagagccgaacagattctgagagataacccagtccaataacctctttccttcttattactcatctgtttttgaggggaagtagagttttgattattaaactttatttacataagtgattccaaatacattttcttgtaaaaaacaagaagacatgttttgcctagtctgttagcaaatacgttacagggcacctgctgtgtgccaggtcttagcctcacagtcatgaaccaggctgacccaccaagatccttgccactgtggggctgacctcttggtcaggagacgcagcaaacaagggaatcaataaataaagtcatctcgccaggcgcagtggtccacatctgtaatctcagcacttgggggagtctgaggtgggaggatcacttgagcccaagagttcgagaccagcctgggcaacatagcaagatgcaatctgtaatttttttttttttttttttttttgagacggagtctcgctctgtcacccaggctggagtgcaagggtgctctctcggctcactgcaagctccgcctcccgggttcatgccattctcccgcccagtctgtaattaatactaaaaaaatgaagtcatcttgcacactgacaagtgtcacgaagaaaataaaacaggaggatgtgttgagaaaatgactaggggagctacttcgggttttttactttttccaatttttaaaattttgatttatttaattcaggtagttttgaatgggtaataaattcacttggtttgaaatgcaaagagtgcaagatggcatacaatgaagtctttctctatccctctcacacttcagccactcaattttccgtggtgggggaggtggcttttgaaacaggggaatcaggaaaggtctctgaggaggggacagttgagcagagacctgacagagaagagtcagctccgcaaataccccaaagagtgttctaaggcagagggaacaatcagtatgaaggcttagaagcaggataaaatttcccccctttttttttttttttttgagacagagttttcactcttgttgcccaggctggagtgcaatggtgcaatctcggctcactgcaacctccgcctcctgggttcaagtgattctcctgcctcagcctcccaagtagctgggattacaggcacgtgccaccacaccaggctaactttttgtatttactacagacagggtttcaccatgttagtcaggctggtctcgaactcctgaccttaggtgatccacccaactcggcctcccaaaatgttgggattacaggcatgagccagccaccaggtccggccaaatttggcattttcaagacagacttgagacctcccaagtgcggtggctcacacttgtaatcccagcactttgggaggccgaggcagcttgattccaggaattcgagaccagcatgggcaacatagcaaaaccttgtctctacaaaaaaaaaaaaagatctctgtgaccaccaaattaaccccacactctctatctcactggtaacccttgcaatgagtttaaagtggactttttacatgtattaatatatggtattctgggtgtttccttgatttttttcattcccttcgtatctctggcaactttttatccacttaatggatgttttcattctatgtcacccacgtcatttacacacttcatgccacccgtttttttaagagacaaggtctaagtctgtatcccaagctggagtataatggcgcaatcatcgctcaccacagcctcgaactcctgggctcaagcaatcctcctacctcatcttcccaagtagctgggaccacagatggatgataccacacccagttaattttttttttttttttagagatggggtctcggccaggcgcagtggctcacacgtgtaatcccaccactttgggaggcccaggtgggcagatcttctgaggtcaggagttcgagaccagcctgaccaacatggagaaaccccatctctactaaaaaatgcaaaaattagctgggcttggtggtgcatgcctgtaatcccagctacttgggaggctgaggcaggagaatcgcttgaacccaggaggtggaggttgcagtgagccgagattgcgccattgaactctagcctgggaaacaagaatgaaactctgtctcaaaaaaaaaaaaaaaaaaaagagagaaatggggcctcactatgttgtccaggctggtctcaaactccctgacctcaagtgatcctcctgccttggcttctcaaagcaccaaagcactgggattacaggcatgacacaccttgcccagtccacacctccttaagttgctgctcactccgtgcttcagaaaaggatgtccaagggtttcactattccctgccctcatcttttttttgttttgttttgtttaattttttttgaggagtcttgctctgtctcccaggctggagtgtagtgtcacgatcttggctcactgcaacctccgcctccggggttcaagtgatcctcccacctcagcccctcagccacccaagtagctgggattacaggtgtgtgccaccatgcctggttaattttttgtttttggtaga[153 bp omitted]ttcttgctctcacatcactgctaccgtaaagatcgttatgtacatatgcaagcgttctcttacacaggggtcttgctacctgttttgtacagcacttaagctaagaagagttttttttacagtttttaagccttgtaagaaaaaagaaaaactgaagagtgtgtaaaccagaccctatgtctagcatatctaaaatatttcctatttgaacttttacagaaaatgtttgccggctgggcctggtgactcacacctccaatcccagcactttgggaggctgagccaggctgatcactttagcccaggagtttgagaccagcctgggcaacacagctaaaccctgtctctacaaaaaattagcctggcatggtggtgtggacctacagtcccagctactcagtgggctgaggttagaggatcgaatgagccctggttatgctactgcgctccggcatgggcaacaaagaccctgtctccaacaaacaaacaaacaaaaaaccatgtttgctgactgttgttgtagtgtaggtggcacccagaaatgccacccctcctatgtcacagatgggaaagctgagacccagagaggagaacacagttacccaaggtcacactgaactggtaactcattcaactaggtaagtttgttgagctgctgagccgggcgggcctggctggggtgagtgaggtccagaaattgattaagtcaactgggtgcagtggctcatgcctgtaatcctagcactttgggagactgaggcaggcagatcacctgaggtcataagtttgagaccagcctggccaacatggtgaaatcccatctctactaaaaatacaaaaattagttgggcttggtggcccgtgcctgtaatcccagctactttaggagggtgaggcaggagaattgcttgaacccaggagggggaggttgcagtaagcggggatcgagccagcgccctccagcctgggtgacagcgagagactacatctcaaaaaaaaaaaaagaaaaaaagaaatttagtctacccattctcccagacaactcagcctgaggaaacacactgagaaacaatgataacctccgaggaacagggttcaaggtctcccagagtggggtggagaaggggaggggaattaatgtcaaagcttggcctggaaggatgacgtgctccccaggtaaaggaggtcaggacaacatcaacatccggacatgggactcggcttggacatacgctggaaaagtggattctctcacatagtcagctggccctgagaattgttggttttacactcagaccttggtggctttccgggttctgggggctcaggcaagagggccataggccagattcattccctgtctccaggcctcagtttacccgtgtgtaaatgtggaactaactgatttcccagggctcgggcgcctcacccgggccaggtggcgctctacccaaggggcgcgaccaaatcagtgacgtcactcggggcggggccggcaagacacgctgcggaagcctcagagggtgtctgggctcagcccggagccggcgtgtgggggcgggggctcccgggagggtctcctcacctccgggccctcctgagggctgggatgatcctgctgtcctccgcaggcgaaactgagtcagagcggggcgtgcgtgggccggaggctttacacaccaaagaagccggcgcctcctgcccaccccgggcgaatgccgggccccccactcccgcactcctcgccagtccccacctccaccccaccccacccccgaccctgcggctgtgagtcagcgaccgaccgcgcccccttggcccacttcctcctcaccttcccggggcgggcggggtggggtgagaggggttgggccctactcccccgacttccactcccgtgcgggtgggggtctcgcccccttagtaacctctccgaaattgacagaagagaaacgctggggaggggcggtgttccgaagatgggatttcagggagaaaatctgagaccacttgcttaacttgagggtcctcctcgacccccaaaattgagcggagtacgagatggagaagtcgatggggaaagaaatcgcgccccttccgagaccctcctcagaattcccacagtgggagcgaactaggaagcaagggaggtccccttccccttcaccaacttgcccctcaggtgggggtgattcccagggtgcacccctgggctacaacattggggagaggagcgagatcgcggaagccgagggtgcagagttgcccttttaagcgccctccaccccctcgcctggaggcgcacgcggcccctttaaggcgcggggcattgtgggtgcggggagtggaattttggaacgaaatgtaacgaagagaagtacagtagtaagagtaacactgtagccgccaccggcaaggggtgcgcgctggggagcggacgctgcatcccctttctgctgcaggaacctctcatcagaccgcctgagggaagcggcgcccggagacccgccccggcccggtccacattctccccaggaagccggactctatggggcgggaccctgggggagcctgagccgagcccggagccagccccgaacccctgaacctccagccaggggcgccccgggagcagccagcccgtgggcgagccgcccgcccgccgagcagccatgaggtgagccggacctgccccccgacccgtccccgcccgggcgggctccgcgccccgcctttgtccccctcccccccagctagctccgggctggaatttggggacagatccttgggagcctcggatttgagctgaatccccttggacgcgccccagaaccgtcgatcacttctccacgactgactccccaagctcggggggtggtggcggtgaggttctcctgggagccctcaagatttgggggcgctcggaggactcccgaattgttaagactttttttagaggacctcaaagttggcagcgactccccgcagggatgccaggattgaggcagggctcagactctcctccccctccccccagacttcagctcgaggtccgggaaggattgtgggggaccgatttgggataccctgggacttggaagagagactgagactcagaccctgggtgtgcaggtcccccgtttacttggtgctggaaaaagtctccccaagtgggaccgcgctccataacttcgggggtacttcttaatcccctggattttgggggtcacttaggtcttcctgtggaggaggctggtgtgaaccgatccagggacctggacgcagcctccagagtctggtgggaccccccccttccccgtcgctccgcacacaatctgcttaactggccgtgcctaggaccgagcgggcgctcggagcagagggcggctccccgcctccggccataagggcggcccggctcccccacctgcgcggccctggagagggagggggcgcggcagctgggggaagggggcctttgtcttcctgactcacctgtcgagacagctggtgtggggggcgggcaccaagcgctgtaggccggctgccttccccaccacggcccctccccctttgctcaccgtccccctatccacccggagccttggggttggaggagggggagctggaaagcttcaaggtcatagccctcttccctagggacccaggcttcccagataattccagctatcttcccaggaatttaatcctgggggtggcggcccaagggacccagggatttggtctggccggggcctcccccgaactcctgggctcacctgagggcggggccagtgtgggcaggggggcccaaccatcccccctattcttccctcccctggccccccataatctctcccatggggccagagcctgacaatactatctcccttcctctactctctctgggacttcctgccccaaagcccccagcctgagcagggaggcccctggggacggttggggattaaccccgtggtgcccacatcccccgcatttcctgaacccctgccctttgacatcggagtggcgtggcattcctttttatgaccactagagaatccccctcccgcgtttgttccttctgatgtgaaaggcatggctggaaaatttggagcaaggaggacacccacagataccctcaagacttcctgcctatccgctccccattatagcaacatcccttccaagtccgccctggagaggggtcagtttagggagcgtcgctctcttccttcgccctcttcctccgggactcttctctccccttgccccccagccccgcccctccaccccccctcgcgtttccggtcccaggctcggtggaaggcggatggcggatgtccgagttagtgctgcctcactcactgcaaccgtaaaagggcaggagcggtgtctgggccggccccctgtcctccccaccaccaccaccaccaccagcaccagccctggaagccctggccctcccacaaggcccacctcttgctgtggtggtggccaagcatcccgtcttgtgggggtgctggggtggggtgcggtgcagaaatgaccagatgcctgtcccaccaaaaggccactcccacctttccagggggtctcccctgcaggtggtcacacccgacttcctgggctgtgcctcttctccaaggacagccagaattcaaaacccatgcccctattacccagctggggaaactgaggctcaaagagaaaaagacatggccaagatccctcagaaattcctaggcaacgttggaggggtggaggagcctaggatcctctgatttctggctggtttggctggggacagtcctgggggcagttggaagagaggatgttaagatggaaaattacaagatatagttctttttctcccagtttgacaaatatttgttgagtgttggctgtgtccgggactggagctggggtgctgggaagacagagaagcgaggcagaggtctagaatctcagggcagaagggacttggggagaactggggtccatttctttcttcttccaataatagctatttttatttttaaaaaataagagaccatttgatcaagcatctattttatgtggggcatttttgtgcctgacagcaattctggctggtttttttgttggtttgtttgtttgttttgagacggaaattttgctcttgttgcccaggctgttgtgaaatggcatgatctcggctcactgcaacctccgtctcctgggttcaagcgattctcctcctcaaccttccgagtagctgggactacaggtgcctgccaccatgcccggctaatttttatatttttagtagagatagggtttcaccgtgatggccaggctggtctcgaactcttaacctcaggtgatccacccgcctcgacctcctaaagtgttattattacagacgtcagccaccacacctggcccctcatggcagttcgaacaatgatactattacaaccttgtggcctccccaccccggtactcagtttatagatggggaaactgaggcacaggaaagttaggcaaggtgcctattaaactcaaacagggccaggcgccggggctcatgcctgtaatcctaacactttgggaggccaaggcagaaggatcgcttgagcccaggagtttgagaacagcctgggcaatatggtgtaaccccgtctctacaaaatatacaaaaattagctgggtgtggtggcatgcgcctgtagttccagctactctggaggctgaggcgagaggatcgtttgagctggggaggttgaggccgcaatgagtcatattcttgccactgcactccagcctgggtgacaaagtgagaccctgtctcaaaaaaaaaaaaaaaatagagataacatgctttccgtgttcttaatgaagaaaaagaaaaaaaaaaaggaacgtgctttcactgtgaaaactcttaagataattcagataagccaaatgaaaccgaagctgcaacatttatcttcctattcacttatgggaaactgaggcccaccaggaggaagggactagagtagccccatccccgacaaaagaagatttgtcgtttggaagggtggtgtatatgtatcataggttttatggtataaggagggtatgggctaagtcttgggttcaggggacagtgaagggaagggtaagactgcaagttttgtgaaaaccggattcaccatgcttgattacctctggtgatgggaagctctctccttcatgtggagcgtgtaccaagttacagttcctgcgtttagggctttttgtccattatctcttttaatccttacaatgaacccagtgagttattgtttccagggctggaaactgagtttcagagaggcaaagccacacaacaaggaggcaacttgaaccgtcttttcatccgccatgtgctagagttttccaaaatgtggggacttgcagggaggagtgggtcctgggctggctggaaaattaaagtgttctcatgtccaatggagggttctagacttcgggaaaacacactggaaatgggcagaactcctttccatctcacagcccccgcacccccgttttatggctatgggattttcgttctggcttttgtgtagtttacagttttatttattgaacttaagtagtgagttaggtttttataggtaatttcaacccatgataagaaaacaaataataagcagtttgaaatacttactgaaattattgaaatggtggctgggcctggtggcttatgcctgtaatcccagcactttgggaggtcgaggcaggcagatcacctgaggtcaggagtttgaggccagcctggccaatgtggcaaacgcccaaaccccatctctactgaaaatagaaacattagcctggcgtggtggcacacgtttgtaatcccggacactcagaaggctgaggcaggagaatcgcttgaactcgggaagtggaggctgggaggctgaggcaggagaattgcttgaacctgggaggtggaggctgcagtaagctgagattacaccactgccagcctgggtgcagagtgagagactctgtctcaaaagataaatggtacaaaatatttgtttcttccctccccagttcctgagttcccctcaatggaggcagccacagttagtgtcttgggaaacagtctctgcatatatcaccactctgagtgca[137 bp omitted]cctcctgagtagctggaattacaggcacgcgccaccacgcccagcaaatttttctatttttagtagagacagggtttcaccatgttggtcaggctggtctcaaactcctgacatcaagaggtccgcctgcttcggcctcccaaagtgctgggattacaggcttgagccactgcgcctagcctaccttttttgtttgtttgtttttgtttttgagacggagtcttgctctgtcccccaggctggggtgcagtggcgtgatcttggctcactgcaacctccgcctcctgggttcacgtgattctcctgcctc[131 bp omitted]cttggcctcccaaagtgctgggattacaggcatgagccaccgcacccgaccttttttttggttttgtaaagcctctgatcaacactaccttgtactttggcttttaaaaatttcaatttagctctgcttcttcatctttaaatgaagttaagaacttgtgggaacttcgtttcaactatgagcccctctgcttacttgctgtgtgatctggggcaagtgccttcactcctctgtgcctgcaattcccccttgtcaaaagggtgagcgtcagagcctatcccatgaggttgtagagtcatgcagcagggaaattggtgtcaagcaccaagaagagtgtctgggacccaggctgactgagaaatgttaggtgtcctaggtaaaagtttgcctttttttgtgagggagtcttgctctgtgagggagtcttgctctgttgcccaggctggagtgcaagtgacctgaacaaggctcactgcagcctcatcctcttggactcaagtgatcctcctgcctcaccctcctgagtagctgggactacaggcaagcgccaccacacccagctaattttaaa[142 bp omitted]tgggttcagtgattcccctgcctcagcctcctgggtagctgggattacaggcatgagccaccatgcctggctaatttttgtatttttagtaggcatagggtttcaccatgttggccaggctggtgtcgaactcttgacctcaagagatccacctgctttggcctcccaaagttctgggattacaggcataagccaccacacccagc[137 bp omitted]tccctactatgtgttggacgccattctaggttctggggacacagcagtgaacaactgggacacaaatttctgcctttttggcagcggagacagacaaatattgtgttgggcaggggtcactgctatgaaatgtgcagcaggggatgaaaaggagagaagcgtttccagctaagggagtgagggacggcttcttggaaggggtgacatctaaggagagacctgaaagtggggagaggctaggcctgaggaagaagcagcacacaggcccgaggcaggaatgtgtctggcctgcgggaagagcagcatgggggtaggaggtctagggtctggaacagagtccccaagggacagtggagcgggaagaaatgagatctgaggacacacagatcacggaggccctggagagaacttggcattgattccgtaggagcctggagccttcaagaagaagaagagacatcccaccttgtaggtttttgttagtttgttttgttttttagagatggggggtctcactgtgttgcccaggctggtcttgaacttctggactaaagcaatcctcccgcctcggcctctcaaagtgctgggattacaggcatgagccaccgttccccgccccacctcgtgttttaacaggatccttctgttacaatgggtatagtgttccctggagaggggcaagaccaccccttggtcacccagcaggcgccctgttctccggccagtccagagcctcagtagggcagggctgcctgggagagcaaagtgcagccagggcggggcagcagcagccccgggctcctggccagagtcggccctgggtgtgggtggcaggtgtgggtgaggccgaggccttaaccctgccttgccaggggcagcaggagccagaaacagcccccgaggctgtgtttgtctggaaagggcacctggtgtttgggtggggcccacacagttcccggtggttaaggcttggaagcctgaattcacatcttcactctattcctcagtagctgtgtgactgtgggcaagtcactcaacctctctgggcctctagtcctcacctgcaaaattagaatgagtggctctctggataagctgcagtgagaataaaatgagtgactttgggggaggggcttaaggcccctgatccacctgaaatgcctagtaagagggagatggcacaattaggtaaatttgagggtccctaccccaggtccctacccacagctgagtctgcctagggactttccctgccctgacttcccagcatcagtgtcacacccagcccccagccctcctagagacagaggctttgcggggggtgtctaatttctgtccccggaaacctctgaccaccaacttccccatttcaggaaaaagcctggtgtgggtggggtggggaggagaccagtgcttccccttcccctgtgtgaccttgggcaagtcacttcctgtttgagttcctgtctaggcctgagtttcctcactgggggagaggggattgaacctcccagaggggctggtgggagggtcccgagggttgtagctgtcccgggccccagtggtgcccatgagagggatgttgacagttactgagctctcggcgtgtgctggacgctgtaccaagcacttagctttttttcttttttttgaaacagagtttcactctgtcgcccaggctggagtgcaatggcgtgatctcagctcactgcggcctccacctcctgggttcaagcgattctcctgcgtcagcctcctgagtagctcagactacaggtgcacaccaccacgcccagctaatctttgtacgtttttgtagagacgggatttcaccatgttgcccaggctggtctcgaacacctgagctcaagcgatccattcacctcagcttcccaacatgctgtaattacaggcgtgagccaccacacccggctgtaccaagccctttaggtgcccagattcatgtgcccctcccccactgccctggaggtggggactgtcattttcccagttcacaggcaagaagaggtcttgagtgggaaggtcatgtgcctgagtcacatgaagtaggtggctcagtggggatttgaacccaggtctggggatatcagctcctgaactctgcaccagtttactgacacctcccacccaggctaagtcagacgttgccttttccaggaagtcctgcctgactctccaggctggggcaggcgttccttcagggtacccccagaccctgggctccttggtcctaaacctgggttggtaccgtctggggacagctgtgtctcccacactggactgtgagccccaggagggtggtgccggagctgtctgggtcactgctgtgtcttcatccccagccccacccaatataggccagacacagagcagggagtatctggggaatggccgctagtgccctggggagccaggcgaggggtgggcagcgggaagtccctttggaggaagagctcagaggtctgggatgggtccccaacctgctgcaggcctcacacttcccctcccaagcctcagcttcttcctgagcaggcagtggtggaggggggtgcgtagagatagggaaactgaggtcaggcaggggctggtccctagtgcagctctgggctcttggcctccttctggcccctctgtcttccctcctgccctctgctctgctaacccgcatccccccactggcattggcctcggcctcttacacccctcagcctgtctctccatctttatcttttccttcttattagttttgttgtgttgtgttttttatttttcattaaaaaagtttttttgtggactgggtgtggtggctcacccctgtaatcccagcactttgtggggctgaggcaaatggatcacttgagcccaggagttcgagaccagtctggccaacatggtgaaacctcgtctctactaaaaatacaaaaaattagctgggcttggtggtgcatgcctgtgattccagctactcaggaggctgaggcggagaatggcttgaac[135 bp omitted]ctgaagtgggaggatcgcttgagctcaggaggtcgaggccacattccaacctgggtgacagagagcaagactctgtctcaaaaacaaaaataaaaataataataataattattattattagagatggggtctcactatgttgcccaggctgctctgaaatgcttgggctcaagtgatcctcctgcctcaacctccaaagtgctgggattacaggtgtgagacaccacgccaagaccatctttatctctttctgtgtctgcctcttcctccaggtcccctgtctgcccatcctttttccccacccctcccccatctgttcatctgtctgtctgccttcagtctgtctctcctctttgtcaacccgactctccctttcccacctctctctgcgtctgtctcttgcatctcgtttgtgtgtttgcctgtctctcctgatctgattttctctcctgatctgtctcccccgtctccttctgtccacgtggctcctgcctccctctgtgtcactctcttccttccacacactgtctttgtcccttggaatctcccaggagagacccagataagaaggtgaccggcccctctcccttttcctcccgcctgcagcgagacggtcatctgttccagccgggccactgtgatgctttatgatgatggcaacaagcgatggctccctgctggcacgggtccccaggccttcagccgcgtccagatctaccacaaccccacggccaattcctttcgcgtcgtgggccggaagatgcagcccgaccagcaggtgcagcttcccgccggccccctctgtgggctgaacccctacccgccccacccctgcgcccgccgcccctcacccccctttcccctcccaccaggtggtcatcaactgtgccatcgtccggggtgtcaagtataaccaggccacccccaacttccatcagtggcgcgacgctcgccaggtctggggcctcaacttcggcagcaaggaggatgcggcccagtttgccgccggcatggccagtgccctagaggcgttggaaggtcagaaatggcggcgggcaaaggggaccagtgaatgcggctgtgtggcctggggctgccgctttaccctgctgggacttggtttactcgtcggtaaaatagagcgaattcattgttatcatggaaaattatcactagcattttgtgcattccagtgtgaccgtgtgcacctatgtgtaaaatgcaccattggcccggcgccgtggctcatgcctgtaatctcagcactttgggaggccgaggcacacggattacctgaggtcaggagtttcaccgtgcccaacatggtgaaattgcgtctctattaaaattcaaaaattagctgggcgtggtggtgcgcgcctgtaatcccagctattcgggatgctgagggacgagaagtgtttgaacccaggagatagaggttgcagtgagccgagatcaggccactgcacttcagcctggcgacagagcaagattccgtctcagaaagaaaacaaacacaaaaaaaatgcacgattactcagggatcagtactccatgaactttacacaggcacactcccgggaaaccacctcccagatcaagacataggtaggtcctgccccagaaacaggatctcgctctgttgcccaggctggtgtgcactggcacaatcatggctctctgcagccttcacctcctgggctcaagtgatcctcttgcctcagcctcctaagtagctgggaatacaggtgtgcaccaccatacttggctctttttttgttttgttttttgagacagagtcttgctctgtcacccaggctggagtgcagtggtgcaacctcagctcactgcaacctccacctcccgggttcgcgtgattctcgtgcctcagcctcctgagtagctgggattacaggcatgtgccaccatgcccaagctatttttttgtattttgtttttatttttatttttttgagacagagtctcactctgttgcccaggctggagtgcagtggcacgatattgcctcactgcaacctccgcctcccgggttcaagcgattctcctgccctagcctcccgagtagctgggactataggcgtgagccaccacacccgggtaattttttgtatctttagtagagacaaggtttcaccgtgttagccaggatggtctctatctcctgaccttgtgatccgcccgcctaggcctcccagagtgctgggattacaggcatgagacaccatgcccggcccttgtattttagtagagaaggggtttcaccatattggccaggctggtttcaaactcctggcctcaagtgatccacctgcctctgcctcccaaagtgctgggattataagtgtgagccaccatgtctggccacctggatcatttcaaattttttttttttttttactttttgtggagatggtctacaggctggtcttgaactcctgggctcaagtgatcctcccacttcagcctcctaaagtgctgggattacaggcatgagccactacacccagcccagttgctttttttttttttttttggagacggagtctcgctctgtccccaggttggagtgcagtggcgcgatctccgctcgctgcaagctctgcctcccgggtaaatgccattctcctgcctcagcctcccgagtagctgggactacaggcacccgccac[138 bp omitted]cccggccttttttttttttttttttttttttttttaatatggagtctcactctgtctctcaggctggagtgcagtggtgtgatctcagttcactgcaacctccgcctcctgagtttaagcaattctgcctcagcctcctgagtagatggaactataggtgtgcaccaacatgcctgtctaatttttgtagttttagtagagacggggtttcgcagtgttggccaggctggtctcgaactcctgacctcaggtgatccactcgcctcggcctcccagagtgctgagattacaggcgcgagtcacgcgcccagcccagttgctatttcttaaaccttaacgtgcacatgaatcacctggggatctggttaaagtgcaggctctggtgcaggtgggctgggcggactgagactccacattctcacaagtgccctggtgatacccaggctgctggtctgcggacgtgactgagtagtgaggttttaggtgactgccgtgcatctggcctggaatcactgctgtagaactgaaagtcaccaaatgcaggggtgtttgcttcgtgggacaacttctgtgctagtgcggaaggggcttgctcctctggggcacacagaaaaatacagtgggcttcagttgagtcatctgtaaattggggctaattcattgttaattcgtagccaattcaattcaggtgctagggccagaggcctggaggtaggtgaggaagaagctctttacctttccaggttcttaggtaaggtccaagtggctgtaacagtggttaagagctagccaggggccaggtgcggtggctcacgcctgtaatctcagcactttgggaggctgaggcaagtggatcacttgaggtcaggagttcgagaccagcctagccaacatggtgaaatcccatctctattaaaaatacaaaaattagccaggcatggtggcaggcgcctgtaatcccagctactcaggaggctgaggcaggagaatctcttgaacccgggaggtggaggctgtggtgagccgtgattgcactgctgcactccagcctgggtgacagagtgagactctgtctcgaaacaaaccaacagtggttaagagcctggctgctggaatcagcctgaattcaagtcttgttcctgcacattccaccctggagaaatctggggcaagtgactgttccccgggccttagcttctcctgtcactgggacatcacaacagcacctaccttagggcaactcaggccagggaagttggtgctgcctcacctcccaatgtgcgtcctcctgggcctggagcctcagggcctctggaaggaggaagtgagcgcctctgggcaggattcctgggaggcctgggagagcaagggaagcgccaagagctgagcagagttctgggactgatccatggccctttctctctcacctttcaggaggtgggccccctccacccccagcacttcccacctggtcggtcccgaacggcccctccccggaggaggtggagcagcagaaaaggtggggctgggccctgggtggggaaccttagccgctgccagagttccatatgttctggaacccttgactcctagagttcagaacccagccaacttgcagttttcagaatgttcaagaaacttctgacactcagagttgcagaacctcctggtccctgcagattcctggaaatcagaatatggtggttgaaagaatcttgtggctgggcgtggtggctcacgcctgtaatcccagcactctgggaggccgaggcgggcagatcgcctgaggtcaggagtttgagaccagcctggccaacatggcgaaatcccgtctctactgaagataacaaaaattagccggtcatggtggcgcccgtgcctgtaatcccagctcggcaggccgaggcaggagaatcgcttgaacccgggaggcagaggttgcagtgagccaagatcgagccactgcactccagcctgggtgacagagtctcaaaaaaaaaaaaagaaaagaaagaatcttgggcattttgtaattcggtgttcctgacagtttagtgactgggatctcgcatcctgatctctccctgtcgctgccctgccctccattccccctactctcacccagcccccttcttggttccctaggggaggaaggcttgggtgagtattaggagccagccaccctggagacctctgagagagaggacggaggtcgctggccccttcgctggccatccttagggccctgattgacggcagctctctcgcctccccccacaggcagcagcccggcccgtcggagcacatagagcgccgggtctccaatgcaggtgatgctcagatagcttcgggagttgggagggggcctccctggaggaagtggccagccagctggacagtgaagaatgaggcttctctctctcagctgcccccttttctgtgtttgtttcaggaggcccacctgctccccccgctgggggtccacccccaccaccaggacctccccctcctccaggtccccccccacccccaggtttgcccccttcgggggtcccagctgcagcgcacggagcagggggaggaccaccccctgcaccccctctcccggcagcacagggccctggtggtgggggagctggggccccaggcctggccgcagctattgctggagccaaactcaggaaagtcagcaaggtgaggggccgggagaggtgggcagggggcaacagggcttttatgggggatgaggccagggctgccggcggtgtcattgggctggaaggccaaaaggcctgcccctaaagctcctgccccttttaaatttctccagcaggaggaggcctcaggggggcccacagcccccaaagctgagagtggtcgaagcggaggtgggggactcatggaagagatgaacgccatgctggcccggaggtgagcctgagcctggacccccaagtcacctggagttccagttcagtagggcccagtcagaggagggctccaattcctgtttagtttgtttcttttggtgaatgttccccctttgataaccaggtttgggatataatggtggggtttgtcatgaaatgcctgaggcttgcaaccacctaggtagcctgtagatgttctaaaacccagaattctagaaccgtaggagatcctgcctcagaattctgggaactcaggttcctgcaatctcagtgttccaacacagcaccgctccaccctcggaatcttactgttccctaatataagaatcatagaacctcctccaccctgattctagaaccacaatctcttgaattttttttttttttttttttttttttttttgagatggagtcttgctctgtcacccaggctggagtgcagtggtatgatctcggtccactgcaacctccgcctcctgggttcaggcagttcttctgcctcagcctcctaagtagccgggattacaggcatgagtcaccacacccggctaatttttgtatttttagtagacacaggatttcaccatgttggccaggctggtcttgaactcttgacctcaagagatccacctgcttcagcctctcaaagtgttggcattacaggccactgcgcccagcacaatctcttgaatttctaaaactagagtttccttaggttttcggagttccagaattctatgcgctaggatctacatttctagaactcccctcagaaggggatgggttgggtgacggaagcacgtgtttttgcttttctctcctgcagaaggaaagccacgcaagttggggagaaaacccccaaggatgaatctgccaatgtaagtcagggactcttcttgccctacatctcttaggccgtaccatgagggtagggatagtgggatgtgtggggtttgaacctgaaagaggaaatgggcagaggtgtggcaggggctggctcatggcagttttatttcctaccagcaggaggagccagaggccagagtcccggcccagagtggtgagtagagtgcccagtccagccacaggaactacaaatcccagaatactctgttctcacatgttaagcacccttataggagagtcagggcgaatggtgctggggattgtagtctcctgagatggggctttgatcaggggctgatgaggttgggggagtaagattgattggggggcagtcttttgtccctgatctttctgatttcttgcctatccccagaatctgtgcggagaccctgggagaagaacagcacaaccttgccaaggtaggccatcggtcctggggcccttggggaggtaaaggcgggcagatcgcttgagcccaggaggtcaagaccagcctgggcaacatggcgacaccccatctctacaaaaattagccaggcgtggtagcacttacctgtggtcccagctactcaggaggctgaggtgggaggattacttgagcccaggaagttgaggcctcagcgagccatcatcatgcctgcactccagcctgagaaatagaatgtgactgtctcaaaacaaaacacaacaaaccaaaaccaaaaaaaaaaaaaactggggccccaaaaatacttggacttgcccaatttataaggcagagctcaatgtgacccctggaataggaggcggggaagcaggtcctctctctaatctcattgctgtcccaaaccacaccaactcccccaggatgaagtcgtcttcttcggtgaccacttccgagacccaaccctgcacgcccagctccagtgattactcggacctacagagggtgaaacaggtaacttgggggggaagttggggaccacagcaagagagatctaggtctggcccctgccactggcatgccgtatgatcctagataacatctcagaaacctcaggtttccaatctgacaaatggagaaactggattgggtcaaggatgaccgagactccacacccccttttctggcacctgtgacagacattattaatctatcaccgcgctcattccagatgagtgccttgaattctttccgcacattgacccagctgtccatcaccaattggagttggcaggaggctggaatgcgcttgccaaccttggtactggatgttctccagtacttttccggctccaaggatccagaattctcccctagaatcctccagtcactctgcgaccttgacagcgatgtcatggtgtcgatgtaggggtaggtctcaaacctactacccctggcttttccatcaacaagaaagaggggactctggcagggcacggtggctcatgtgtgtaatttcagcacattgcgaggctgaggtgggagcattgcttgaggccaggagtttgagaccagcctggggcaacatcgggagacccccatctc[132 bp omitted]tgaaacccatcgctactaaaaatacaaaaattaggctgggaatggtggctcacagccataatcccagcagtttggaaggctgatggggacggatcacgtgaagtcaaaagttcgagaccagcctggccaacatggcgaaaccctgtctctactaaaaatacaaaaattagctgggccttgtggggggcacctgtaatccagttatttgggcggctgaggcaggagaatcgcttgaacccgggagccagagattgcagtcagccgagattgggccactgcactgcagtctgggtgacagggagactctgtttcaaaaaaaaaaagaaaaagaaaaagttacctgattgtggcggcaggtgactgtggtcccagctacttgggaggctaaggcaggaggattacctgagcctgggaagttgaggctgcaatgagctgtgatcatgccattgcaccctagcctgggcaacagagcaaggttccttctcaaaaaataaaagaagggggattcattcctgcaagtcccggtaccccctcctgattagttttaccccattaattttaggagcttctggaagaggtgaagaaggaattgcagaaagtgaaagaggaaatcattgaaggtgaggtggtttgctttggttttgttcttaaacatttacttattttggaggcatcatgtccctgggcaagagccctgttttggaagggaggaggcagagactctgcccctgacctctgctccttgtttccttccagccttcgtccaggagctgaggaagcggggttctccctgaccacagggacccagaagacccgcttctcctttccgcacacccggcctgtcaccctgctttccctgcctctacttgacttggaattggctgaagactacacaggaatgcatcgttcccactccccatcccacttggaaaactccaagggggtgtggcttccctgctcacacccacactggctgctgattggctggggaggcccccgcccttttctccctttggtccttcccctctgccatccccttggggccggtccctctgctggggatgcaccaatgaaccccacaggaagggggaaggaaggagggaatttcacattcccttgttctagattcactttaacgcttaatgccttcaaagttttggtttttttaagaaaaaaaaatatatatatatttgggttttgggggaaaagggaaatttttttttctctttggttttgataaaatgggatgtgggagtttttaaatgctatagccctgggcttgccccatttggggcagctatttaaggggaggggatgtctcaccgggctgggggtgagatatccccccaccccagggactccccttccctctggctccttccccttttctatgaggaaataagatgctgtaactttttggaacctcagttttttgattttttatttgggtaggttttggggtccaggccattttttttaccccttggaggaaataagatgagggagaaaggagaaggggaggaaacttctcccctcccaccttcacctttagcttcttgaaaatgggcccctgcagaataaatctgccagtttttataaatgctaagatctctggagtgatttgaaggcctgttctgatggggatggaggtgtgctcggcccccggtgcccctccaggaagatttggtcctctgctgagaacccctgcctcctcccaggaatccaccttcccttcatcttccttcccaccctgcatattgcgcctgctcactcatcctcaggcccgcagccaggatgatctctgccccctccagcctccctccccatgccccttaggaggccacttcctccccatcccaccctgcccttcaccaccctaggggaggccagaagcagcctcactttgtgtagccttgggcaagtccatttgcttacctcaggcctcagtttctgatttgggaaagggctcataagatgattctctgcccccactctaccactctcccagcttctttcctctttttttttttttttttttttaatgagttggagtcttgctctttcacccagtctggagtgtagtggcaggatcacagctcactgcagccttgaactcctgggctcaagggatcctcctgcctcagcctcccaagtagctggaactacaggcgtttggtatgacgcctagctaatattttcatttttcgtagagatgcggtcttgctgtgttgcctaggttggtctctaactcctggcctccagcagtcctcctgctttggcctcttaaagtgctggaattacaggcgtgagccactgtgtccggccttctttcctaatttcaatgacattttgcagacgcacattatggttctcagacacgttcttaagatctttaccccagagctcctttaattagaaaacgctgacagtcgatttataaagtagcattcagagtcacagagctcatccacgcccccttcagttgtcgggtgggtaggtcatatggcctggtggaataccccgcttggacagggggacctctgggctgagggacaggtagtccccctggaggaggcctttgcgtgaaggagggcggaggaggacctggaccagtccaaaggcaggaaggaagggcgatccctgcgtaccgtgaggggcagatttggagggaagttgggcgaactgacgatgacttaggtagtaaagggacaggccggtccctagcaaaggcaactgaagaggacagcgagggaggaccggataaaaggacagtagcagtaggtccaggactggggactggtgaccaagtgactgagcctgaaagccagaatggactagccctggtcaagaccggtttttcctcccaaaaggccacgtcctgctggaacagaccacagaatgccgggctgggaggcgtttccctggaagacccagcatagccatgccagtggggtgcgccataggtggaagaagaggggggttatgttggatcgatccactcagggaggggaggatgtcaatgacaggtactaagatggattaaggtcaggagccgcagggtggtgactcattggagctaacgcagtccaggattcacccccacctttccccctaagactgaggtagatggaagggggcgggtcgggaagtccgtaggaactttgtgcatctttacaatggtctgtaccaatgaggaggaggtaggtggtgttcggtgcaaaggatgagcgtcctaggggaagggtccactcaggtgagtgagggtgcgggtgacagaatgagaggtggctaaatccgggtgcagaattttgttttgccaaaagaggtggacgtcctgctggcctacctagcggtagggaggtggggtctgataaaagacgctgtctttccaaagtgctcaacaaatgcgctggcaggggcggggtgggatagggcggggtccttcttggaacgttccacctgcaggaggcggagagtcccagtggaaggtaccactgggcaggttagtagggaggttcgatcagctccagcccaggatctctccggcgcccccgaaggactgggtggtgtcagctgggccggtccaggatgggacagtgcggagaataggccaagacagagacttcgcagtccagacagcagtcacctccaagaccagggccccgagacctcctatttctcggacgccggcgcaactgggggtgcaggcggcgggtctcggaggcagaggtgggctcgcacctcctgcagctgagcgcgcagctcctccagggcgagctgcgtcgacgtcgcctgcacctgcgcctgcaactcctcgagcgccagccccaagtggcccacctcgccccgcagcgcctccctggcaacacgtcgctccttttccttgcggcgctgctgcaactggtggcgccaatactccagcatcaggcagctgcaggcggtgatgaagatgatgccctcgcccagcagctccgcgcccagctcggcggctgcaccctcgttcagcggcttgatggcagcggcattgaaacccatgatgcgcattttggtccgcatctccagccagtggtacactgcaggaaaagacaggagtcaggggtcttttgcagggcagcctcctataagccccgaccctctgtgcttcgatgtccccgttgtagcaatggggatgtggtcaccacaatcggacgcgtgctggcggggacgccttaacgaagacaagtgcaggcctcacacccagaatcctctagggaaaacttccttaactaatgacttactcatgtgaaggtggagtgtcagcttttgcatcgttataaacacagaagatgctgatgctctttttttttctttaatttttctttttttgagccagggtttcgctctatcgtccaggctggagtgcagtgccgaaatcacagcttactgcagcctcgaactcctgggctcaagcgatcctcctcccgcctcagcctccagagtagctgggacaacgtgtgcgcgccatcatgcctggctaattttttaattttttgtagaaatgggggctccttgcgttgcccaggctggtctcgaactcctgggctcaagcgaccctcctgccaaagcctcccaaagtgctgggactgcaggtgtgagccacggagcgcggccctgaggctaactcttaattccatcaataattcatacttcgctgggcgcggtggctcatgcctgtaatcccagcactttgagaggccga[133 bp omitted]gaagcaggagaatcgcttgaaacagggaggcagaggctgcagtgagccgagatcatgccactgtactccagcctgggagacagagcgagactccatctcaaaaaaaaaataaaattgtaacttgatttttcactgcactccccctcaaccccatgaactatatggaattcatcacatattctatctccttccctctcccctcccaatttttacaagtggtttttatttttttactgtttatttttatttatgtatgtatggtttttttttattgagacggggtcttgctctgttgcccaggctgtagtgcagtgacactatctcagctcactgcaacctccacctcccaggttcaagtgatttccaactaatttttgtatttttactagagacgggttttcaccatcttggccaggctggtctcaaactcctgacctcaagtgatccgcctgcttcagcctcccaaagtgctaggattacaagcatgagccaccatgcccagcctttatttatttatttattttcgagacagagtctcggtctgtcccccaggctggagtgcagtggtgtgatcttggctcgctgcagcctctgcctcccagattcaagccattctggtggcttagcctcccaagtagcttggttcaatggcgtgtgccaccatgtcacctactttttttttttttttttttttttttttttttttttgcattttagtagagacagggtttcactacgttggtcaggctggtctcgaactcctggcctcaagtgatccacccgcctcagcctcccaaagtgctgggattacaggcatgagctaccacacccagcctatttttttttactgtttattggtaacctatgtaattgctttgtgcaatgctttgtgctgcctgaaattgaaaatatagaccatgtaaaatatggaggttatggaaatattaatcctgtagatccataatgaagatgtatttttatttcactaaaccagtggcatgtgaagcattatcattaaatgccagctggactcactgcttcgtatcgtgccacattttcattttcttttatttcaactttgacgttactgtatgaaggttttagtttttcctagaatgatgattctcaaactaactatgtgacccacaaaaatttaccatgggaccaagatcatccagatgtttgctcctattctgtttattaaataaacagttgtggacacactagctgttctctgggctgctgcaggactgtcctccttcatactgctcctcctcttttgaggaacttgcatcctctttgttgaatttcattctagttttcctggagtatatccctagataccttttgcagaaagggtgcttggtatctcagtgttttgaatccttgaatatctgaaatatctttttccaccttcacattagatgagatgataaattctagccccagaatgactagttcgaaatcctattcctcagcagtttggtggcctggttccacgatgtgtaaaggcagaggggcttgttgtcatccctgtggcactgacattgcaccaagatgaatgtttttcttattccccttaaactcttctatcttctatccaaatcccgtttctctctttagcccttcgaatttttcttgtctgctcagtaaaggattaacttcatccaaatagaggtctgacctttgccttttactcctgggaggtaattttttagttcttggaatgtccagcctgagtttacatggggccttgggccacaccatatggtttgtgctaacagtggtgatttatggtgggggctttgggccatgtgatatcagcttaacctctggaggggctagaatctaaggggagccacacaagtggtcagccttatccacatgctgatccctattaaaaaccctggacaccaaggctcaggtaggcttccctggtgggtgacatcatgtcacttatcattgctgggagaagttagtgctgtccacaactgtaccaggtattaaattggcacttggaactctcctggacccatggacctcttccctgggctgcttttaatctgattcttttcactgtaatgagccacaaccatgagaataactgatcctagtgagttctgtgagtctttctagcaaattactgaaactgatggtgatcttagagactcctgagcttgcagtcaatgacagaagtgagggtggtcttggtgaccccctaaatgtgtgtcttatctgttgcctcctctccattttctcctacccttctcctaccccttcccagtctggaacgccaccctgcactgatctcctcactttcccttcctgtttttttccattgctcctttttgttacaccactgggaggttttgttgactttcagaacttattttttccccctaattttcagtctttatttaaaatttgattataaaatatccaaacatacagggaagtttagtgtccattcggctttaaaattattttattttattttattttttaatagagatggggtctcactatgttgtccagccttgtctcaaactcccagcctcaagcaatcctcccacctcagcctcgtaaagtgctgattgcaggcatgagccactgtgcccagccctaggatgatttttattttttaaattttttttgagatggagttttgctcttctcccccaggctggagtgcgatgacaccatctcggctcactgcaacctctgcctcccaggctcaagcgattctcctgcctcagcctcccgagtagctgggattacaggcatgcaccaccatgcccggatatttttgtatttttagtagagatggggtttcaccatgttggtcaggctggtctcgaactcccaacctcaaatgatccacctgccttggcctcccaaagtgctgagattacaggcatgagctactgcatctggccaggatgatttttcttttttttttaaggcggagtctcactctgacgcccaggctggagtgcagtggcgcatctctgctcactgcaagctccgcctcctgggttcaagccattctcctgcctcagcctcccgagtagctgggactacaggcatttgccactatgcccggctaatattttgtatttttagtagagatggggtttcaccaagttagccagaatggtctcgatttcctgacctcatgatctgcccgccttggcctcccagagtgctgggattacatgcgtgagccaccgcgcccagctgaatgtagctaatttttaaataatcaggagacaccttgtgctacagatgtacgttgtttccttttaccctatacctttgaggccggtacttaaacatcagccggatcctaatccaggagaggtcagttcaccagtaagtccgtactccagggcaggccaggccaggccaggccaagcttctgttggttgaatgcaaagcatggtgaggtgtgtgaattcacttcagtctcctatgggaggggccctcttggtggccctggatgggcagggtcaaggtgaaaacccagggattggtttcacaaggttgaacaagcggctccgtcctgggcaggctccatgcttctccccgaaagaaggcaccatagccaccattaagcagtgggcaggttgttgcctctgactctggcctggagacaagtcagttcagtccatgtgaattctagtatcagtttgtcagtttgcacacacatgcacatgcacaaatatacaaacacacaccttttggcatagaattgggattgacttgaatctataaatcagtttataagatgatatctttacaatattgaaccttccaattgaaggaatccacagctttggcacaaagattattttacagtgaaaacacttgtaatgttatctacactcctcttattggactaaaggagagcctcctgaaaatacaactgccattaaccccctccaagggagttttctgcgaattccaggaaggagacagactgtccatctcttttagtgttaaaaatcacacaggaaagcaatagaggccaggcgctgtggctcatgcctgtaatcccagcactttgggaggctgaggtgggtggatgacctgaggtcaggagttccagaccagcctggccaacctaattaaaccccatctccactaaaaatacaaaacttagccaggcatggtggtgggtgcctgtaatcccagtactttcgaggctgaagcaggagaattgcttgaacctgggaagtggaggttgtagtgagccaagatcatgccatcacactccagcctggtgacaagagcaaaactctgtcccaaaaaaaaaaaaaaaaaaaaagtcaagtaaagaaaacaatagaactatccatacttttccactgaacccctttttctttttcttttttttgagatggaatcttgctctgttgcccaggctggagtgcagtggcgtgatctcagctcaccacaacctccgcctcccaggttcaagcgattctcctgcctc[132 bp omitted]cggccttccaaaatgctgggattacaggtgtgagtcactgcatccagcctgaactcctttttcttaagttggtaaataaacctttacttccagctattcaatgagttactcattacagagttcccttgcctaatgtgtaaataaagtttttctttccacgtgttgatctgtctattgttaattaatttgcaggttcccaacaacagggatctagattggtagaggaaaagattttcctgtcaatgcaatccatgaacatggtattctcttcatttaggtctttaagaaatttatctcaataatgttttgtagtttacagaatagatatcttgcatgtaaattcagtttattcctatgtattagatattttgatactattttgatggcaacatttcaaatttcattttctatttgtttgttgctggtactgatgataggaataaactgatttccgtaccttatatgcagtgatcttgataaattattacttttttttttttttttttttgagataaggtctcattctgtcacccaggctggagtgcagtggtgcaatcatagcttactgcagcctcaagtgatccacctacttcagcctcctgagtagctgggactgcagggacacaacaccatgcctggctaatttttgtaattttctgtaaagacagggtttcgccatgttgttcaggctggtctcgaactcctgggctcaagcgatccaactgccttgacctcccaaagtgctgggattacaggcatgaaccgccatgcccagcctaattagttcttattcttcttagtcatataatttgtttataaattattttaattgtacatatacactttaattgtttgaacataataactgtttttttcttttcttttttttttttttttttaagagttgaggtctcaccctgtcacccaggctggagtgcaatagcacaattatagctcactatagccttgatctcctgagctcaagagattctctcacctcagcctcctgagtagctgggactaaaggtgcctgctgccacaccctgctagaaactggttttcttgccgggtgtgatggctcatgcctgcaaccccagtacgttgagaggccaaggtaggcggatcacctgaggtcaggagttcgagaccagcctggccaacatggtgaaaccctgtctctactgaaaaaattaaaaaattagccaggtgtggtggcatgcacctgtaatctcagctactcaggaggcttaggaaggagaattgcatgaacccaggaggtggaggttgcagtgagccgagatcacaccactgcactccagctggatgacacagcaagactctatctcaaaaaaaaaaaaaaaaattaaaaaaaaaaatgtgggccgggcacggtggctcatgcctgtaatcccagcactctgggaggctgaggcaggcggatcacatgaggtcaggagtttgagaccagcctggccaacatggcaaaaccccgtctctactaaaaatacaacaaaaaattagccaggcatggtgacgggtgcctataatcccagctactagggaggctgaggcaggataattgcttgaactttggaggcagaggttgcagtaagtcaagatcgtgccactgcactccactcttggcgacaagagtgaaactctgtctcaaaaaaaaaaaaaaaagtgtatggaaacacaaagggccaagaatagtaatactgaagagaaaaactggagaccttacactaccagatataaagctatcataaagctataatcatcaaaacagggtggcatttccacatgaatagacaggccagtggtaaagcgtagagaatccagaaatattcacacatgcacagtcatatgacttgtgacgaaagtgacactgtagtgcagtgggaaaagaatggactttttaagacacgttggatcacttgaatattcacagagaaaaaaataaaccttaacatctacctcacataatacacaaaaattaattccacagggattgtagatcaaaatatgatagacacaaaaataacacttttagaaaaaaaaagtaggaggctgggtgtactggctcatgcctataaactgtgctttggaaggccaaggtgggaggattgcttcagagaaggggttcaagaccatactgggcaacatggtgaaaccccatctctacaaaaaataaaaaattagcccggtatgctggtgcacctgccaccatgccaggctaatttttaaaaaactttttagtagagatggggtttcgccatgt[132 bp omitted]gctgagcgaggaggatcacttaagcccgagagttgaaggc[137 bp omitted]ggcaaatcatagactggaagaagccatttgcaatacatcaatctgacaaataactcaaatttaggacatacagatacctcctgccaatcaaaaggggaagggtagagaacctagtggagaaggacttgactcacaaaagaggatggtatctttttcttttcttttattttctttttttgagatggagtttcgctcttgttgcccaggctggagtgcagtggtgcgatctcggctcactgcaacctctgccctccggtttcaagcgattctcctgcctcagcctcccgagtgccagagcagggagggagaatgacgagactaaactgtagcttcagctttctctctttaaaaaccaaagcaaagaggacaaaatgttcatttctattaattctaagtggtgggtacaaggttattcattatattgttttctgtatgtctgcaatatttcataatatatatgttttcaataaaaattagctgggtgtggtggtgtgtgcctgtagtcccagctactcaggaggctgaggcgggaggactgcctgaattcaggaggtgcaggttgcaggttgcagtgagctgagatggtaccactgcactccagcctggaggacagagctaggctccatatcaaaaaaaaaaaaaaaaatgccacctgaaaaaaaaaaaaaaaagattctagctagctatggagtctcacacctgtaatcccagcactttgggagatcaaggtaggaggattgcttgagaccaggaatttgagggcaacatagtgaaaccccatcttcacacacgcacacaaaatagctgggtgtggtggtgtatgcctgtggtcccagctcatcaggaggctgaggggggaggattgcttgagcctggaagatcaaaactgcagtgagctgtgattgcactactgcactacatcctgggcaaaagagtgagtccctatctcaagaaaaaagcaagtgaggccaggcacggtgtcttacacttgtaatcccagcatttgtgggaggccgaggtgggcagatcacttgaggtcagaagttcgagaccaggctggccaacatggtgaaactacctgtctctactgaaaatacaaaaattagccaggtgtggtggcgtgtgcctgtaattccagttacttgggaggctgaggcaagagaattccttgaacctgggaggcggaggttgcagtgagccaaaattgtgccattgcactccagcctgggcaaaaaagtgagactccgtctcaaaaaaaaaaaaaagaaaagatgctcaacacattagttagtagagcaatacaagtcaaattcacaatgagatgccatttcccagccactggaatggctatagtcaaaacagtgaacaaccactaatgcttccaaagtttctgtattagtcagttttcacacagctataaagaaattcctgagaatgggtaattataaaggaaagaggtttagttgacttacagttctgaatggctggggaggcctcaggaaacttacaatcatggcagaaggcaaaggggaagcaggcacctcctcacaaggcagcaggagggagaagtgaaagggcaggaaaaactgccattttaaaattcattagatctcatgagaattcactcattatcaggagaacagcataagggaaaccacccccatgatcacttccctccctcaacacatgaggatgacaactcgagatgagatttgggttgggacacagagccaaactatatcagttgtagggtaacaaaactctcgcatgtcactggcggaaatgtaaaatggtgcagccactttggaaagtagtttggcagtttcttaaaaagttaaacataggccaggtgcagtggcttacacacctgtattcccagcactctgggaggctactcatcgcttgaacccaggagttcaagaccaacctgggcaacatggcgaaaccccttctctacaaaaacatcacaaaaaagttttaatatttttattttttctgccacgctcggctaatttctgtatgttttgtagagatgaggtctcactatattgcccaggctggtctcaaactcctgacctcaagctatccacccacttctgtctcccaaagtgctgggattacaggcatgaacactacacccagccaaaaaacacaaaaattagccgggcgtggcggtgcatgtctgtaatcccagctactgggcgggggtggggctgaggttgcagtgagcagacagcgcgtcactgcactccagcctgggcgacagagccagaccttgtctcaaaaaaaaaaaaaaggaatgagatattcatgcaataaaatggaccatgcattgtatgactccatttacattaaatgtcccaaataatgcaatctattaaggcagaaagtagatcagtgatttttaggggctgaaggaaggagaatggagagtcactgcaaatgaatgtgagggatcttttggagatgatggaaatgttctgaaattggaatgtggagatggttgcataaccatgtcagtttactgaaaatcat[211 bp omitted]gaggcaggagaatcgcttgaacccaggaggcagaaattgcagtgagtcaagatcgcaccactgtgctccagcctgggtgccagagcgagactctgtctcaaaaaaaataaaaaataaaaaataaaaaataaaataaaacaaagggtgagtttcatggtgtgtagattatgccttgctgtttaaacaaacaaaccaggccaggacacggtggctcatacctgtagccccagctacttggggggttgaagtgggaagatcgcttgagcctgggaggttgaggctgcagtgagctgtgactgcaccactgcactgcagcctgggtgactgagtaagaccctgtctcagaaagaaaaaaaaaaaaaaaaagggggccaggcacggtggctcatactaatcccagcactttgggaggctgaggcgggcggatcacctgaagtcaggtgggcgtggtgacaggcgcctgcaatcccagctacttgggaggctgaggcaggagaatcacttgaacctgggaggcggagaatgcagtgagccaagatggcaccactgcactccagcctgggtgagagagagagactccgtctcaaaaaaaaaacaagcaaaaaagccagaacaccggggtccaggacctctctcactggaattggcaaatgctgtcatgaatcataggcaggatgggtgggggttcacagtctctatgctgggcccaagtggatcccaccaaactcaggacctcaggaatgaatgtctgtacttctgaggtttttgattttccagcatctaaacccctctgttgcattggggaagcgccattgctgttagtctgagtcaggaacagcctgcaacagaaactggagaaacccatggcttccccatatggggactgttctcccacaaccagaaggctgccatacaatgtcactgggaacccaggctccttctcgttcaatccctaccctcctcattatggggcttttagccacatgcccaaaagatgcctgctgcccctcggcatcacagcctccttctacacaggaggtgagggcagggggtgtcagaggaagtgtgtgtctaatctgtcactttttatggaaaagccactagattttacagagcccccatgccacatagccatcctgtactataggggggtctgggaggtccattgttcttgactggatacagagtcacccctcatttaattggggcctggtgtagcggctcaggcttgtaatcccagcactttgggaggctgaggcaggaggatcatctaagtccagaagtttgagactagcctgggcaacacagggagacctggtctctactaaaaaataaaacaaaataaataagagaaatttttttttggagaaagagtctcagtctgttagccaggctggagtgcagtggtgcaatgatggctcattgcagcctcgacctcctgggctcaagcaaacctcctgcctcagcctcctgagtagctgggactataggcacacaccaccacacctggcgcattttaaaacattttatagaaacagggtctcactatgtttcccaggctggtcttgaactcctgggctcaagcgatcctcccaccttggcctcccaaagtgctgatattacaggtgtgagccaccacacccagcctgaacctgaaatcttggggaaggcttcaaggatacgaagagacccctaggatccatgttagggtgtggagtaggtccacggcagtggtagggggtggtacccatggtgctgacagccctctgaccttggagtccctgagtgcttcatgctcgctgcaacccaacagacaggctccttgctgggaagtggctgcccagccagggactatagttaggtgcagttaggtgtggtcagggcaccgagttctaggaaaaataagccagccaagtgaagccggctacttccagccctggtccatatgagccatgctgtggtcctcatgaagaccaccccagggtgaccttgaaataaacacactgaagatggcagagctgcaacagcctgagtccctgaatgactgtgtggaggagggctgccctgccaacctgttcccggctagtacagccgtgcactgcttaatgacagggacacattctgagaaatgcattgtttggtgattttgtcattgtgcaaacatcacagagtgggcttacacgaacctagatagtgtggcctgctacacacctaggctatgtggtagagctttctgctcctaggctataaacctaaacagcatgtgactgtactgaaaattgcaggagttgtaacacaatggtaagtacttgcgtgtctagacacatccaaacatagaaacggtacagtaaaaatacggtggtatcattttatgagaccactgttgtatatgcggtttgttgtggacagaaacctcattatgtggtacagtacttcactgtttttttgtttttttttttttttttttttttgagacggagtctcgctctgtcgccaggctagagggcaggcagtggtgcgatcctggctcactgcagcctccaactccctggttcaagtgattctcctgcctcagcctccagagtagctgggactacaggcacctgccaccacgcctggctaattttagtacttttagtagagacaggtttcaccatggtggccaggatggtctcgatctcctgacctcgcaatctgcccaccttggtttctcaaagtgctgggattacaggtgtgagctatcatgcccagcgcgtgacttcactgttttgtcttattttgtttgtttatttatttatttatttatttttgagacagggtctcactctgtcgcccaggctggagtgcagtggcatgatctcggctcactgcaacctccaactctccagctcaagcaacccacccacctcagcctccctcgtagctgggactacaggagcatgacaccatgcctgactaacttttgtatttttgaagaaatagcgtctctgtatattgcccaggggctggtctcaaactcctgggctcacgtgatcctccagctttggcctccctaagt[133 bp omitted]ctcctgggtttaagtgattctcctgcctcagcccccggagtacctgagattacaggcacacgccaccacgcctaatttttgcatttttagtagagatggagtttcaccacgttggtcaggctagtctcgaactcctgacctcaagtgatctgcccaccttggcctcccaaagtactgggattacaggcgtgagccactgcgcccagctgtattttaatttttataatttatttttatttgtagaagaggagtcttgctatgttgcccaggctgttctctaactcctgagctcaagcaatcctcccgcctcagcctcccaaagtgctgggattacaggtgtgaacactgcaactggccaacgttactattttaggagcaagaagtaaactcgttcactcaatatcattacacatatggggtctctgttacagcatcggcatctctaactgtaaacctctcaaggttcctgctggttttcttagcctccagtgagctacctgatatccttccagtaagttctttttctgcttcagttagcccaggaaggttcctgttgctggcaatgcagagtcattttgcaaccgttcactctgtgctaagcaacttcctaagtgttttgcatgtattaattgattcactttcataataaacttacaaaggaagttctgttatcaggcacaagatacccagtgacttgcccaagctcatccaactggtatgaggcagagctagggattgattccaggcattttgggatctgagcccatgcccttcccatgatgcttcactgctctcgagacaaatgatctaagcctaaaaagactgcaagctacatgcacgttcatagcagccctattcatagccaccacgcggaggaaacaaccccaacgttcaacagatgtatgaataaacaaattgtggtctagcc[135 bp omitted]ca[142 bp omitted]gaaaccttgtctccaccaaaaacacaaaattagccgggcgtggtggcacacacctgtgatcccagctactcaggaggctgaggcaggagaatcacttgaacccgggaggtggaggttgcagtgagccgagatcatgccattgcactccagcctgggcaacaagagcaaaactccgtctcaaaataaataaataaataaataaataaataaataggaaattaaccgggcatggtggcccatgcctgtaatcccagctacttgggaggctgaggcaggagaatcgcttgaagccaggaggcggaggttgtggtgagccgagatcgtgtcattgcactccagcctgggcaacaagaggaaaattccgtctcaaaaaaacaaaaacaaaaacaaaaaacaaaaattagccaggcatggtggcaggtgcctggaatcccagctactcaggaggctgagg[132 bp omitted]caagacaaggcaggataggcctctacttcaaaacagagaaaaaaggggctggatgtggtggctcacacctgtaatcctagcactttgggagctgaggcgagtggatggcatgagcccaggagttcctgaccagcctgggcaacataaagagacccccatctctacaaaaaattaagaaattagctgagtgtagtggtggcacacctctattcccagctactctggaggctgacatgggaggattgcttgagcctgggaggctgaggctgcagtgagccgtgattgcaccaccgcactccagcctgggtgacagagcaagaccctgtccaaaatgaaacaaacaaatggaaaaaacaacaacaacaaccagaggctgagcacagtggctcacacctgtaatcccagcttaaaaatctcttcccagagtaaaagttagtcttcatgctggcccaaggcagcccacattatacaggtttgtataatacatacatcatatgtacatgcttttcttttttttttttttttttttgagatggagtctcactctgttgcccaggctggagtgcagtggtgtgatcttggctcactgcaacctccgtctcctgggttcaagtaattcttctgcctcagcctcccaagtagctgggactactggtgtgtgccaccacgcccagctaattttttgtatttttagtagagacagggtttcaccatgttgcccaggctggtcttgaactcctgagattaagcaatcctcccacctcggcctccctaaatgctgggattacaggtgtgacaggccatgcttttctttaagaaataaaataacggagaataaaaagtaacgaagttgcccatcacacataagaacaattattattcagagaaacttgttctaacaagacatataatacataatgtatgatattaacatatcatccaatgtgttatggaacacacttaatgggtttcatatgtttataatatatattaagtatatagaatgcatatatatctgtagttattcttcatgaaatggaatacaataaaataggaaatattaaaccgggctgcaaatattaagggtaattatttaatgaaactttcattccaatgatatgtacataagcacatacactacatataatagatgatgttatgttacacatgacataaaatatatattttatattccattatatattgtgtcacataatatatgaattatacacttttaaaatacatagaattgtaaattattgtataaatatgcacacgatggattacataaactctgcttttttttttttttgagacagggtctcactttgtctcccaggttgaggtgctgtggcctgatctcagttcactgcagccttaaacacccgggttcaagcgatcctcctgcctcagccccccaagtagctgggactacaggtgtgtgccaccatgcctggctaattttttgttttgttttgttttgagaccaagtctcactctggcacctaggctggaatgcagtagtgcaatcttggctcactgcaacgtccacctcctgggctcaagcaattctcctatgtcagcctctcatgtagctgggattacagatgtgcaccaccacacccggctaatttttgtattctttttattagagacggggcttcaccatgttgggcaggctggtctcgaactcctgacttcaagtgatcctcccaccttggtcttccaaagtactgagattacaggcgtgagccaccgcgcctggcctaaaactctgcttcttattgtggcacgtggctgtagattgaggtggaggttctgagatctgcgcgcagtgggggttactgctgagcactggggtcatttcctatggggaaggagggagggagggaggactccacagagggggaagctgaagccagatgtggtggaagcagaggcctgagtgatcctgttggggctccagagctgggatgacctccacagttgtgccaatcaaggcaaggggcagcctttgcttgcctggccccctcacctaacttctcccctcgcttactctattccaggggatggtaaactttttctgtaaagggccagagagtacgagagccctaggatctctgtgcaaatactcagctctgtcactgtactgcaaaagcaactgtggaaaatatgcaaacgaatgagcgcctgggttccaataagtctttatttacaaagacaggaagcaagggtccccttgatttggcccaaaggccttggtcagcgagcctctgctctattctgacagccagaaactcttgctgttccaggaacaggccaaggccacatctgtcctaggactttcacagatactcacagccctcttcctatctccctccatctgaagcgctgcctcctccctgcccacctgtctagatcagcggtgcccgtaagtccggaactcctaccctgcctccattcctctcagtcctcatcaccctatgctggattagctttttccttttttttttgagatggagtctcgttcttgttgcccaggctggagtgcaatggtgcaatattggctcaccgcaacctccgcctcccgggttcaagcgattctcctgccacagcctcctgagtggctgggattacaggcatgcaccaccatgccctgctaattttgtatttttagtagagatggggtttctccatgtcggtcaggctggtctcgaactcccgacctcaggggattggcccgcctcggcctcccaaagtgctgagattacaggtgtgagccaccacgcctggccactctttccttctttattgccggtctctggcactagaatgtcagctccagtgagggcctctgcttgctcccaactggctcccagctactagaatggagcctggtgcagttgatcctcagtacactcagagttgccatgcttctcctctctctgtccacaccgactccagctacaagccattgccactgggggacccaagcctgccactcagcaacacagcgaccagcccaggagtagctccgtgagccaatagatcaggttggggcttatgtaaagcccattttctcctggggtggctctcagccattttgcctccctccaggcaatggcctgccctacagagaaaccaacaagagggacagcagggcctgccaggagatgggaggggcacagccctcagggcacctcccagggttttgtgagctgggatgaatgggtttatagtcctgagtcactccagagggaggattccggattcagcccagcccctgcttcctaaacaactatggggtggggcagggaacactggaaaagaaatgtacgtgtgagcatctgtaagacccggtgacggcagggctggggctgtctctgtcaccactgtgaccccagcatagggtggggcagagagtgggtaactcagtgagttttgtgttttattttttttattttttttttttttgcgggagacgccctaccaaggacactgggtccatgtcccggtgcgggaccacctcagtgagttttttgagtgaaagaataaataaaggatatttttcctaaggttgacatggaccttatttatttatttatttatttatttatttagagatgaagtctcgctctgtcacccaggctggagtataatggcatgatctcggctcactgcaacctccgcctcccgggtccaagagattctcctgcctcagcctcccgagtaggtgggattacaggtgcacaaccaccatgcccagctaatttttgtatttttagtagagacgaggtttcaccatgttgatcaggttggtcttgaactcctgacctcaggtgatccacccaccctggcctcccaaagtgctaggattacaggtgtgagccactgcgcccagtcccaaggactttttaaatatgaaaaaagaatgcatcaacttgaagataatcagcttcatttacaaatttattctaacccctctccccaaattacaaggtacacagaattctagctagcagaacacacgagcagtgaaccatcctctggcctcttgcattttgagaggacgttctttccacttccacacactctggccacccctgacgccgcagtgggggaagtagatggccctgctgcccacgatgactggctgcctgtcagggcagggcagggcagggctgagtgcgaagtctctgagatgtgagagcagcactccatctgggtcaggacagcgctggggtcaggaattggagctcctgcctgtgttcacactcccacctctgttttttttttttgagttgagtctcactctgtcacccaggctggagtgcagtggcgcgatctcagctcactgcaacctccacctcctgggttcaagcaattctcgtgcctcagcctcccgagtagctgggattcaggaatgtgccaacatgcccggctaatttttgtatttttagtagagacggggttttgccatgttggccaggctggtctcgatctcctaacatcatgtgatcagtccaccttggcctctcaaagtgctgggatgacaggcgtgagctggcctgggtcactcccagttttaaacacagcccactcaggacccactcggtcagttccctctgctcc[148 bp omitted]accccgtctccactaaaatacaaaaattagccaggcgtgggtggtgggcacatgtaatcccagctacttcggaagctgaggcaggatcattggttgagcctgggaggtagaagttgcagtgagccgagattgcaccactgcactccgtcagggtgacggagctagactgtctccgaaagaaaagaaaagaaaaaagaagagaaaagaagaaaagaaaagtttcagaacctgtttcttggctttctatctgggcagatcttggtccaggccagttttacctctttagagaagggaggtgaggatggaagtcggggaaagcccggccctcccactttcacctgcagcttcccaaaagcgggcccaggtggaatggtcacccagtttacacaatgctatgatctctggtgtgatctggggctgctctgagaggggatagagagggtctcccactatcaacgccacctctgggatggtctgggcctctgtgtagagatcgtcaccctcccagcctctgctcagccatcgcctctccctcctcactctgcagctggggtaatccaagcctctcactctgcccctactacttcaccaccctgggcagtcagcccctcactggctgtggcatctctggcaagtccctttgcttacccctggccttagtttccccagctcatagggtgactcttgggcctctccccatcagaaccctcccagtttccctcctgattttaataagctctgtacccattgtggagatccacatggtggttcaggtacagcctcaggatgccttcatcaccttgcagctcctctaatgagagagctacagtcggaaggacagactgcaggctactgggacccaccccctcccgcttcagtggcagatcctggaagagaaacccagtagaaaagggtggttcctagactgttcctctcagctagcaggaaggccaaatggcccgcggggttggcaggagtcccagggtactttttttctgagaaagggtctcactctgtcatccaggctggagtgtagtggcgcgatcacggctcgctgcagcctcgacctccagggctcaggtgatcctcctgcctcagcctcccaagtagctgggactacaggcatgcatcaccgcacctggctaattttttattttacttttgtagagatggggtctcactatgttgcccaggctggtcttcagctcctgggctcaaagagatccctcctgccctggtctcccaaagtgctgggattacaggtgtgagccactgcacctggacgccagcgtactcttggggtgaggaggaatagtgggctgaatggcttgaatggtgtgcccccaacagacaagtccacatactaacccccaggacctgtgcttatgacagtttatttggaaaaagtgttttttcagatgtaattaagggtcttgaggtgggatcatcctgaacttaagatgggccctaaatgcaatgacaggtgttcttgtaagagacaaaatagaagagggaaaaggccatgtgaagctgcaggcagagccaaggaaggcctggaatcaccaggagctggaagagggagcgtgtccctgtcagcaccttggtttcagacttctggactccagaactgtgtgaattaaattcctgttggacttaagccatcaagttcaccacccaatggtgatctgttatggcagtccaaggaaattaatcaagcagttaaggccaactgctggcctaattggtaggatgggggtgggaccgggggctatggaggcaggagggtactgctacatgaagacaggctgtcgggtcagtccagagctccgaggaaagaaagcaagagcacacagattaggagacacggatggaagatgaaggatgtgacaattgaatccatgggcttggattcgactgggtccctgagaaatgctactgagcaaggtggggaaggcaagaaaggacatgccacacagtacaagctccagggactctgaggacaggaaaatagggggctgaggctgaaggacaggctggattagccctagttaggatcaaatttcccaccacggaaaggggggttggaggacattcacagaaaagatcctgtagtgccattccagtgggttgtgccatagactcaaggatgagggggttctgttggaatagtccacttcgggtctcaagggaaggtacaatgattccagggattgactgcaggccaggaccttttgtgggtttttttaagatggagttttgctcgttacccaggctggcatgcaattgcgcaatctcggctcactgcaacctctgcctcccgggttcaagcaattctcctgtctcagcctcccaagtagctgggattacaggtgcatgccaccatgcccagctaatttatgtatttttagtagagacggggtttcatcatattggtcaggctggtctcgagctcccgatctcccgacctcccgacttcaaatgacccgcccacctcgaccttccaaagtgctgggattgcaggtgtgagccaccgtgcccagccaggattttttttttttttttgagacacagtcttgctctgtcacccgggctggaatacagtggtacaatcttggcctccacctcccaagttcaagcaattctcctgcctcagcctcccaagtagctaggattacaggcacccaccaccacgcccggttaacttttggttttaagacggtgtcttgctctgttgcccaggctagggtgcaatggtgccatcttggctcaccgcaacctccacctcatgggttcaagcaattctcctgcctcagcctcccgagtagctgggattacaagcgcaccccaccacacccggctaatttttgtatttttagtagagacggagtttcaccatgttggccaggctggtctggaactcctgacctcaagtgatccgcccgcctcggcctcccaaggtgctaggattacaggcgtgagccaccgctcccagccgcaccgtttttttcctccttaagagagcactgatgctcagctagagctgaccttagaaggtgagggggagaaaaggccactgcaacacactgcatttccttacagtggtctgtgccgattgacaaaaagaagaaggtgttccagtgtaacagatgagtgtcccagtaaaggttaacactgatcaggtaaaccgggggtgggggtaacaataacacattgattcagctcaagaccaggttccattttttcatttgccagagtgcccacggtgtcctgctggctgggaccttgcaggtcgtcctggtttggagtgggggataggaggtgaaggatgatggagggggctatgttgcaacgcttcacctgctggtcccagtggcaggtaacggctgctcttatcagcaggggtaaccaaatgccaagttgcatcaagatcctggtggtttccactgggccagcgcaggcaagggtggtgcgggaagaaggccacgttaggtacataggccatgtccaaattcaggttccatccagcaagctcctatttcttggacgcaggcactgcgtgggaagcggaccggccgggattgcagagctgggcgcgcacctcttgcagctctgtgcgcagttcctccagggcgccctgtggcggcgccgcctgcacctgcgcctgcagcgcttccagcgccagcgccaggtggcccacctcgtcccgcagcgcgttccaggcagcacgctgctcctcctccttgtggcgctgctgcgcctggtggcgccagtactccagcactaggcagccgccgcccacgatgaagatggtggcttcgcccagcagctctgcgcccagctcagctgccgcctcctcgttcagcggcttgatgaccgtgccccggaagcccatgatgcgcatcttggtccgcatctccacccagtgatacactgcgggggaagagaggggtcaggctgcgctctgggagccccctgcaagccccacccctctcacccagggaatgcagtcacctagcctgggtaacccaggggtcttttaaaagaccagatgattctagcgagcagccaggaataagaaacactgccccagaagggaggtcctcggacttgaggggccgcgccccaagagggacaccaggagcttccacagcgccaagttcatggacggtgtaaaggtccagttgccagatgcttagttccctgtgttcctcccttaagccactgccatcctggctgtcctgccctggcactgtcgccccacccacttcccaggagaaagaccaacctcctttcttgccttattttcccaaaatgcaaagttggggctacagatgggggagaggggggctcctggctccaaagggcagcttaaggtggcagtcgatgctaagtgcctctgaacacttagatacacttgtaataatcaatcatttttgcaagtctgatggctccaatcctagaatttcatcagccctgaaggtgcagctaagagctgcgagctcttcacagtgaggttttgggcacataccttggtgggagctcaagaggtgagtggtgctgctggaacaaaaactccttccttgcctagctgcttctttatgaaggaaggttctcagcacttgagtctttaaaaccaatgcagaattgatgctgcatcctgactcactcctgcaacaattaatattcatccaagggcacatgaaaccacagagggaacccttgtgtggtgcctttgcagactcatttgcaacatctccttttacttttaaggtttagtaattattcatgaaaatgtataaaagatgaactttttgttgttgttgttttagagacggagtctcactctgttgccaggctggagtgcagtggcacagtcttggctcactgcaacctcctcctcccaggttcaagcaattcccctgcctcagtctcctgagtagctgggactacaggcacgcgccaccatgcccgtctaatttttcgtatttttagtagagaaggggtttcaccacgttggccaggctggtctcgatcatctgacctcgtgatccacctgcgttggcctctcaaactgctgggattacagccatgagccaccatgtccatccaaaagatgaacattttaaagtaactgcgcactaataatttcaaaattaactcaatccagaagaaaataacttagcatttagaaccttatggtcacaggaaattaacatgtaaatttctgtatgtattttggttgccgacatataaatcactagatggaattctgtgggtatgtggactgtaaatacaaaagtacatgaacaaaaagaaaccatgtgaaatttctgactgaaaaagaagagcttgtttttatttgtattattttcgagacggggtcttgctttgtcgccccggctggagtgtagtggcgcaatcatggctcactgcagcctcgaccttccaggctcaaatgatcctcccacctcagtcccttgagtaactggga[136 bp omitted]gcctcctgagtagctgggactacaggcgcccgctacc[142 bp omitted]gtcatttttgtattttttttaaaatagagatggggtttatcagtatgttgcctaggctggtcttgaactcctgggctcaagtgatctggctgcctcggcctcccaaagtgctgggattgcaatcgtgagccactatgcctggcctatatatatatatctttaaaccagacattggtaggcatcaaatcattattgtatgcgaactgcaataaatatgaagggaaggatgcaccagctgtttgaacatgtcagtatcataacacaccagaaccagaaattccatccttcacaactacttaaggttaatgaagaaaagttttacttgtcaacttgaaaatgcactagagggcacacaatttattttttctttttctgagacaggatctcgttctgttgcccaggctggagtgctgtggaacaatctcagctcactgcaacctctgcctcccaggctcgagtcatcttcccacctcagcctcctgagtagctaggacaacaggtgcatgccaccatgcctggctaattttattttttttgggtagagatggggtcttgccatattccatcttatttatttatttatttaacagatgggctctcactctgtggtccaggatggaaggcagcggctccatcacagttcactgcaacctcgaacacctagactcaagcaattctcctgcctcagcctctggagccgctagaactatagatgccccaccatgcctggctgtttttaaattgttttttggtagagactgggtcttgctatgttgccaaagcaggtcttgaactcctgggctcaagcaatcatcctgcctcagcctcccaaagtactgggacgacaggagacagccactgagcccagccactacacatttttcatcttcaaaggggtggggtggcaggaaggcttggggagctctgctggagctggagggaagacctgaggtgcaagcttagggcccgagaagtcactgtcactgtcactgtcagctgctgcagttactgttacagctgtgacttaggccctgggcttgtgggttcctggggtccaggctgtggagacccctcccacactgaggtcttagggtcaggctgatctggggtccccccggggctccgccacctgctgcctgagcaatgacagcctgccccaaggcccctctgtaacacaggaaggacagcatcatcctgacaatgacactcgccagacctggtggtggcccagagctgggcccgtaactgtcactgcctccttcatgtcagggacacctagcacagtggccagagagtggtgaggggtgagggttccagatcctctagccttcctgggtgaggttcccagcgtggaaatgcaagtgtctcagtgcagaccaagcatggggatctgggccagcaggtgggtctaggtgtgccaatgggagtgggcacatacccaggccacaggaaatcaaatcaagagggtgtgtgtgtgtgtgcacgcgtgtgtgcacgcaggcatgggctttcagggctttcagagcaggggccgacggcattctccctcgggccagcggtcagatgtggggttcaggaaacaaggcccaggtggggatgaatcacagggctgtgattctagaagggacagctgtgaggggccgggacaggctaagctggaggactcaccagacttgcgggggtcaacacgctccagatgtctcctagacctctcacactcagcacatccaaacctgaacccagcacctggccccacacctgtcccctggctagagacgggggcctcagcccagctgttccccttctcccacagcctctcagctgcgtgtcgggtccattctgcatcttgaacatctctcccagtggattcccttctgctgtcctggtccaggatccatcccagctctgaccaacgttctcctccctgacctcctgaataggaggaatacagcctgtctatccccttctgagtgcctatcacaaccaggaatagtggctatccagttacctgtctgcaatcagtctccccactgtcctgtaagcctcacaagggtggggcccagggctgtcacagtcactgctgtgtccccagcactgcccagtgccaggccaggcacacgcatgatgctcattagatctaagcttaacacataagtgagtcccgcctccagcctccttcccacctgccggccccagcctcacccctctgcaattgtcccccacgcagcaatcagaaggaattggtgagaagaaaagaacaaactggctgggcgcggtagctcaggcctttaatcccagcgctttgggaggctgagacaggcagatcatgaggtaaggagttcaagaccagcctggccaacatggtgaaacccatctccagtaaaaatacaaaaaattagcggggcgtggtgggaggcccctgtaatcccacctactcgggaggctgagacaggagaatcgcttgaacccaggaggtggaggttgccgtgagccaagaccacgccactgcactccagcctgggcaacaagagcaagactgtctcaaaaaaagaaaagaaaagaacaaacctaccattccccgtcgccccacccccaactcctgccgcaaataaaagtaacacatggcaagaaaacaaagtactcaaactataaaatgtaaagccaaagtcccctcctcagaggaaccctcaactactgcggtcgccagcctgttttcccctagcgccatctcctggacagcccatagtaagcatacctcactcatttctgagctcttcaactggaggtttgttcagatctacgccatcgttacctactcataatccagccccactatgaaaggtgagcactctgcccccatgcggcctgccctttctccgctcccccatttctacaggggatttgtatgcagtttttattattctatgttctgctgttttttttttttattttttttagacggagtctcgctttgtccccaaggctggagtgcagtggcatgatctccgctctgcaatgcagtggccatggaaacactctccagtgtggtgtgactaaggcagagaggagaccctctgagtgctgcttcatgagactttggtgcttttttttttgatacagagtcttgctcttgttgcccaggctggagtgcagtggcttgatcttggctcactgcaacctctgcctcccgggttcgagtgattctcctgcctgagcctcccaagtagctgggattacaggcgcccaccaccatgtccgactaatttttgtatttttagtagagacgggatttcaccatgttggccaggctggtctcaaactcctgacctcaagtgatccattcaccttggcctcccaaagtactgggactacaggtgtgagccaccgtgtctggcctaactccaacttcatgagagatcttaacctataattttccttttctgtaatgactttatcaggctttgatatcagtattctattggactcataaaatgagtaagtcagtattcctactttctctattacttaaaagaatatggacaatggtctttctttctttcttttcttttctttctttctcttctctctcttctttccctctttttctttcttttttttttttttttttttttgagatggagtctcgccatgctgtcccaggtggactgtagtggcacaatctcggctcactgcaacctccgcttcccgggttcaagtgattctctcacctcagcctcccatgtagctgggactacaggcacataccaccacacctggctaatttttgtatattttggtagagacagggtttcaccatgttgaccaggctggtctcgaactcctgacctcacgtgatccacccgcctcagcctcccaaagtgctgggattacaggtgtgagccaccgcacctggccccctccatttctctcttcctgtcttttcccaattcttcttttagatctcagctggactgtcccttcctccaggaagccctccctgaaccataggctgggtcagacacattctcaaggttctcaaagctccctgggcttaacacgaggccggccttaataaatggcagcaagacctttggagtcgcacagacctggactcaaatcctggttctgtcactttctggattcgcaagctgagccttggtgtttccttatcaaaactgggggtcaaaatactcaactgacaggattgggagaatggcaatgacagagtaagggagaaaatgctcagtttgtaaatgttaacctaatatcctcttcctgacttctgtcaggaattttattcctggaagtacatcctacccactggtgtgaatctactcttgggttacatagaatcgttttccgtctcctccctgaactctctccctccagactcactccctttcatctgtcttccataccggagaatcccaactcagatgtcccctcctccaggaagccttccctgacctccagacccctgggatcctctatctgagctctgactgctctgggtcctcactgcatggtgacaagtctgtctctccaactggactgtgaggccgatgcaggcaggacctgaggctaactcggtcactgcactgtccccagccccagataggcacagagcaggcacttaatgaaaaagctgatctgtggaggtgcccaggaggtgaccatggacaatgggtatggctcctgtctctggctcccccatctcccttctctctctcctgatgcttttggtgttatctgtcccctcgagaatgtggcactgtgcattgcccctcctcctggatttcctggattggctccaggccccctctacacatctgtctctgatatagaccctttcctcggcctcagtggctgtcatttctcagggcaccatttcctaagcccttttctcactcgactgtcacatctacttccaggggccactcagaacttcaggacccaaactcctatgctcagatctctctcagccccggagctccaggccacaggcacttcagacactctaggtcacaacacagtggctgaccaagcccagagagatttccccgggaaaggagggatatcttaacccactgaggcaagtaaagtgacgtacttggccacagttaactattgttcaagatttttctgagcatgaaactgcaggtggctggaatgcaaccctttcctcaggaaatgtgctgctaagaccaaacagctccctccgt[144 bp omitted]agaaaccctgtctctactaaaaatacaaaattagccaggcatggtggcgcatgcctgtaatcccagctactcgggaggctggggcaggagaatcgcttgaacctgggaggtggaggttacggtgagccgagatcatgccattgcactccagcctgggcaacaagagcaaaactccatctcaaaaaagaaagaaagaaaaaaaggacaaagcacctcttccccactattgggaacacgcctgcatacgatggctgcttccttgtaaaatgaagggaaggtattcctcatagggtccactactcgatggtgaagggtcgtcataaggacacagtagtgactgctagagcccacgatggcaagacggccatgacgaacatgctggctactgagaggctaaatcccgtggaaccggtaaccggaactgtatactagggaggagggagaggttatttaatatgggagagggaaaggaaaaacatcaaatccttatctttcatacaaggaagttggctgataataaaagatggggaagatcccagcactttgggaggccg[134 bp omitted]gaggcaagacaatcgcttgaacccgggaggcagaggctgcagtgagccgagaccatgccagtcagtgcactccagcctgggcaacagagcgacactccgtctcaaaaataaataaataaataataaaataaaataaaaataaaaaaatgaaagatggggaagaaataataaaagatgagaaaaaaatttccaaatgaggaatgtttagaaattctcttattagggccaggcattatggctcacgcctataataatcccagcacttaagaggccgaggcactggatcacttgaagtcaggagttcaagaccagcctggccaacatggcaaaaccccatctctactaaaaataaaaaattagccgggagtggtgatgcacacctgtaatcccagttacttgggaggctgaggcaggagaatcgcttgaatccaggaggcagaggctgcagtgagctgagatggtgctgcactccagcttgggtgatacagtgagactccatctcaaaaaaaaaaaaaaaaaaaagaaaagaaaaaggaaaaagaaattcccttattaagaaacatgataggccgggggcggtggctcacacctgaaatcccagcactttgggaggccaaagcaggtggatcatgaggtcaggagttcaagaccagtctggccaacatgatgaaaccctgtctctactaaaaaaaaaaagattagctgggtgtgatggcgcacgcctgtaatctcagctactcaggaggctgaggcaggagaagctcttgaacctgggaggcagaggttgcagtgagctgagatcgcgccactgcccagcctgggagacacagcgagactcagtctcaaaaaaaatataaataaataaaagaaatgacacctaaatgaacgtgcatttctggagaagatcctggaacaggcagaaaaggacaccagtggaaacactgctgagataggaatgaggcctgcaggctttataccagtgttcatttcctgggtcgcctcattgcattgtggttatgtaaaatgttatcatccggagactctgggtgaaaggtatgtgggaactctctgtacttttattgtaactcttctgtgggtctaaaattagttcaaagtagaaaaatgaaaacagaaacagcccccaggtggctcgactgtgaggaaatggaccttctcacccatttgctggtgtaagtgtaaatccttgcacaccctggagtcagtcattctgcttctgggcatttatgtcaggttcacccgtccaggtgggaaaggccttgctgggctccttaatcctgcagcatagtgtatgataacaatttttttgtttgttttagagtcggagtctcactgtgtcgcccaggctggagtgcagtggctcgatcttggctcactgcaagctccgcctcccaggttcacaccgttctcctgcctc[210 bp omitted]ccctctgacactataatctcacaaattccagcatttctgtcagcagctgaaatagagtaaggaagtcttgttttttgtttttgttttgagacagggtttcactctgtcacccagactgaagtacagtagcaggatcatggcttactgtggcctggaatcccagcgatcaaacagtcctcccacctcagcctcccaagtagctgggactacaggcgcacgccaccatgccctgctaatttttgtacttttagtagagatggggtt[132 bp omitted]ttttgtcatgttgcccaggctggtcttgaactcctgagctcaagcaatcggcctgtcttggcctcccaaagtgctgggattaccggtgtgcaccactgtgcctgaccaaaacagataattaaaacttttttcaaaaaaatcaaacaagccaccttggcccccaggattccacaggttaagcctatacctctgcacctctgctccctcctcaagacccaataaaatagcagtcctggaaggaaagacagcagaagccacaagaacaaagagaagcatcagggtgggggtgggggggttgggagggtatgcgactaggcggaaggggagggaatcaatgcaagccttgaggcgggagcagatggctgagaggtaactgagccagcagggaggctgctgagacctaggcaccctggaaggggggcaggtagagggaagaaggggagagggggaaagggcggtgacaagaagcagaaggaactggagactaggaccacacatgcaaagtgactgagggtggggttaagcccaggatccctccttgactgggggtaaaccaggaggactctgagaacagcccagggggcaagtgccacactgaaaacaagcctgttcctctggcatggggctggtgggcaatgcagacatcaagagcccactcagccttggccttgaactccagtaaccctgcctggtgttgctggggacaaaaccacacctgccactgaggtccagataggggctctgcttagctgtgagcctggccatgaggtgatgacgatgggaaggatctgggtcaaagacatcccagtggctcccagacccctgcttctctgtctccctccaaagccatttaaaaatacaccaactatctcttttttaagagtttgcattgttccctgctatctttgaagttccacctacattttactttctctataaagttttatcctaatgtgacttttttatgctcaaatgtcctatcataagtctctgaaacaaaaatgtatctataaattaaaatcaaaaatttcattctttgtgattttagttaaaacttttctcggccgggcgtggtggctcacgcctgtaatcccagcacttcgggagaccgaggtgggcggatcacgaggtcaagagatcgagaccatcctggccaacatggtgaaacctcatctctactaaaaataaagaaaaaaaaaaaattagctgggcgtggtggcacacgcctgtggtcccagctacttcggaggctgaggtaggagaattgcttgaacctgggaggcggaggttgcagtgagccgagatggtgccactgcactccagcctggtgatagagcaagactccgtctcaaaaaacaaaacaaaaaacaaaaaacaaaattttctcttggattgcattatcatgcaatttctattagtataccactgatcgaaactgcacgcattacataatttgatgtctagtggctgggcgtggtggctcacgcctgtaatcccagcgctttgggaggtcgaggcgggtggatcacctgaggtcaggagtttgagaccagcctggccaacatggtaaaaacccgtctctagtaaaaatacaaaaattagccgggcatggtggcatgaccctgtaatcccagctacccgggaggctgatgcaggagaatcgcttgaacctgggaggcggaggttgtggtgagctgagatcatgccattgcactccaacccgggcgacagagtgagactaacttttgtatttagtctaattacggctaatttttgtaattctagtagagacagggtttcaccatattggtaaggctggtcttgaactcctgaccttaagtgatccacctgcctcagcctcccagaggctgggattatagccatgagccaccgcgcccggccacaaaaagatttttaaattagctgtacgtggtggtgcatgcctgtggccccagctactcagaaggctcagaaaggaggatcacttgagcccccaggttcaaggctgcagtgagccatgatcctgccactgtactgcagcctgggtgacagagtgacacttggtcttaatcaaatcaatcaatcaatcaaatctgacaaagacatacaagaaaataaaattatagaatatgtcactgatgaccacagatgaaatctttaggaaaatattagcaaacgaaagccagcaatatataaaaaagataatatagcataatcaagtgggatttctgcaggaatataagattggtttaatattcttttttttattattattattgttttttgagatggagtcttgctctgtcgcccaggctggagtgcaaaggcgcaatctcagctcactgcaacctctgctgccagggttcaagtgattctcctgcctcagcctcccgagtatctgggattacaggcgcagaccactgtgccctgctaatttttgtatttttagtagagttagggctctgccatgttggccaggctggtctctaactcctgacctcagatgataatacccgccttggagtcccaatgagctgggattacaggagtgagccaccactcc[136 bp omitted]tgcctcagcttcccaaatagctgggactacaggcacgtgccaccatgcccagctaattttttttttgtatttttagtagagacagggtttcacca[146 bp omitted]attttactcctagataattactgggagaatttcatttctaccaagagaaatgaaaacatccatataaaggcttgtacacaaatgttcatagcacctttacttgcaataacttggaaacaacccaaatgcccatcactaggacagttattaaacaaagcatggcatattcatatactgtaataaaagaaaagaatacacttttattaagagtaataaacaaaataacaaaataaactagacaggcatggtggctcacacttgtaccccagcactttgggaggccaagcggtgaggatcacctgggcccatgagttcaagaccactatcggcaacttagtgagatccatctctacaaaaaataaaataaattagccgggcatggtggcatgtgcctgtggtcccagctactcaggaggctgaggcaggaggatcgcttgatcccaggaggttgaggctgcagtgagccgtgtttgtgccactgccctccagcctgggtgacagggggagaccctgtgtcaaaaaaaaaaaaaaaaaaagaagaagaagaaatgaactattgatacattcagcaagaagtatctcagaagtatcaaatgaacaaaagctaaacataaatttcatagtgtatgattccatttatatcaagttgaacaacaagcagaactaatcaacaaggagagaagtcagataaggagacagagcaggggaggagggacctttctagagtaatgacgatgttttatatcttgggtactagttacatgggtatatgcatgtaccaatactcattgaactgtagcctttagatctgtaccttgcattgtacagatactatatctcaacaaagaatataccaaaaaaatcaagtgccaataattaaacataagaggaggagtttgggagccagtgggatatgacttcttatcctgtactgcctcagggaacctgtttctctcgctttgagagatttcctcactcataaaaccaggatggtcataaactccctaaataaggtggttaagatcatttgctgagataatggaaagcatattaaataaaagctgttattatcagtcaataaattattattcagggtaaacgtagcttcaagccagtctctgccctggttgcacttccccagatgtgatccagtcagatgatgatgatgatgacaatgattattactgttattttgagacacagtctcactctatcacacaagctggagtgcactggtacgatctcagctcactacaacctgagcctccaaaggtcaagtgattctccagttttagcctcccaaaatgctggtattacgggtgttggccaccccacctggcaatccagtcaatttatttatttattttgttatttatttattttttgagacagagtcttgctctgccacctaggctggagagcagtgacacaatctcggctcactgcaacctctgcctcctggtttcaagccaccctcctgcctcagcctcccgagtagctgggattacaggcatgccccaccacatctggctaatttttgtatttttagtagagatggggtttcaccatgttggccaggctggtctcgaactcctgacctcaggtgatccgcccacctcggcctcccaaattgctaggattacaggtgtgagccactgtgcccccgcccaatccagccagttttaagcttgccctaacagtgctccaagtattaacagaattgtgcaggccgcaataggcagtgcttcctcccacagacctggcttgatctttccattacagcaacccgagactgcagtaacacacaatgctccagttaccagaggggcatgactggttccatctgcccagcatcctgggggatcctatctccccaacttttggttcaagggattcaggaggaggtaaccccactcctgagcctggccaattagggcactgctttccctgggccacagagacggtgctgggatggggatgtgacgcagggtggaccactggattcagcctgggaatttggcaggaaatccgggatgaggcacccctctgtgccctggggtcactaggcaggtaactaataccctcaaatgtgccccatgagagcaaggatctttgttctgttgactactgagtcatgcctcttagaacagttcctggcacacagcaggcactaaataaagatttgttgagtgaatgaattactcagcctcctaatggactgaagcatagccacaccccagaaaatgatccccacctctactctcctcccaggcctggagagaccaactcaacttggtatagaggatactcagggg[131 bp omitted]gccaacatagtgaaacaccgtctctactaaaaatacaaaaattagctgggcgtggtggcgggcacctgtagtcacagctattcaggaggc[137 bp omitted]gtctgattaccagtgctactttatattattctctactgtcttagtaattccatcctccccacctccattagagtttagaagccgatactcaccactgcaacctcccatacaccaaggggtgggaggtgacccggttgtggtaagctggcagtgaggggagtttcctgggggcttctggaaaaggattttcctccttgaagcgttaccctcacttacctgaccacccgcccctccatacacacacgcatagacttcctcccttatgaaacataaaggcacaatgcctggagccgcagcagccctactgaggccatgaggactgcctgagcaccaacacagcagagatggagtcctcaggttcccaatgacaccactgagccaccaaaccaaccaagaacaggccttcctcagggcttactgaaaagccagcaaaaaacacccttttgatttaaggtttgattgacatttactggctgggttttcaattaattacagatgagcacaaactaatacagagatacaccggggtcaatgaccgagatggcctctggtgctttctcaggcaggcgccatccccaggctgacacgggcgccctctcctgtccacttggcatattgcttgcagccagcgcaagtagattccctgggatgcactcaggttgcaaatcagccagccctctacacaggggcttctgaaaaagatccctgttcagaaatcggccagaagatttagccatgagtacatgagcaaattccagcaaatgcctctgcataatgaagggtgggactaaaaaaggagcagcgagattaaacgcagccaatgacacacttcttccatctgagactatgtgccttagttaggtctttgccagctgtgacagccacatacaaagaatgtcaaagctggctgggagcggtggctcatgcctgtaatcccagcactttgggagactgaggtgggcagatcacctgaggtcaggagttcgagaccagcctggccaatatggtgaaaccctatctccaataataatacaaaaaaaaattagctgggcataatggcacacccctgtaatcccagctacttgggaggctgaggcaggagaattgcttgaacctgggaggtggaggctgcagcgagctgagattgaaccactgcactacagcctgggcgacagagtgagactccatcttggggaaaaaaacaaaaacaaaacaaaattagccgggtgtggtggcagaagcctgtaatcccagctgctcgggaggctgaggcaggataatcacttgaacctgggaggtggaggttgtagcgagccgagattgtgccactactctccagcctgggcgacagagtgagactctgtctcaaaaaaaaaaaaaaaaattcaaagccagactctcacagagggtttcaccaagagtttccaaatttacttaataatgtctgcataggaaaatgttttcggtgacagcaaaactatttggggggggggggcatgaataaataagtttattttaaaaatttttatgttcgtttcatccctctaatttttgtgtatgtttttaaatgcatataatataaccatactattatatgttagcgctatacatgactgctaaatactttcatttatttatttatttacttattttattttatttttttgagacagggtcttgctctgtcgcccaggctggagtgcaatggtgcgatcttggcacaccgcaacctccacctcccgggttcaagcgatactcttgcctcagtctcccaagtagctgagattacaggcatgcgccaccatgcccagctaattttttgtatttttttagtagagacggggtttctccatgttgttcaggttggtcttgaactccccgcctcaggggatccacccgccttggactcgcaaagtgctgggattacaggcatgagccaccgtgcctggctgactgctaaataattttacatatgtgtacacacgtgcatacatatatgctagggaaggaacctcagaagtgtttccttgataggagaacataataataaatgtttggaggtcaccagcagcagcctggctgccatataatataactgatgtgacgctctggtgattataaataaactccagcaaagtgattttcaaacactggtgcgtgtgagaatgtactctagagactgctaaaaataaacacgtccaccccttccctacgtccaccaaatcaggacctgcaggtagcactcctgggcatctactggaagtgccccagaaagctcactagttttcctccatattgtgcacctttcagctccccaatcctcttggcagttgtgtttaacctggtggttagttagcccttctattgagagctgaacaccaactgttgtagctgtcctttctagaagttttgtttaattctttttccagcttcctggcaatttttcattttacttgtgttttaatatccttctcttttatcctcttaacagataagcttaggtattttatatccacatctgataattccacgtttgcaggctgtgacctgccatgtttttctgctggctctcgctcatggtggctgcttttttcatgtggtgtatatatatatatcaatatatattgatatatatatatattttgtatttttagtagagacggggtttctccatgttggtcaggttggtctgatatatatatgagatatatatatatctctcatatatatcgatatatatgattatatatctcatataaataaaaaataaaaatatatatagtatatatatcgatatatatctcatatatatcgacatatatgagatatatatcgatatatatctcatatatatcgacatatatgagatatatatcgatatatatctcatatatatcaacatatgagattatcgatatatatcgatatatatcatgatatatgtatatcaatatatgatatatatcatatatcatataataatcatatatatcgagatatatgagatatatatcatatatgagatatgagatatatatatcatatgatatatatatcatatatggatatatatcatgatatatgtatataaatatatatattgatatatatcatatatatcatgatatatgtatataaatatatatatcgatatatatcatatatatctatatgagatatatatctatatatatcatactatatatatgatatatctcaatatatacctatatatcatactatatatatagatatatatctcgatatatatctatatatatcatactatatatagatatatatatcatactatatatatagatatatatctcgatatatatctatctatatatattttttttttactgtgagcttgtatgtgctggaactctatctgaaggatttctccaaggcctgggcagagagagcacaggcaggaagagtttatgtttgcccttgccaggtgcttagatacaattaggtacccctaggggttcattctcagcctgcaacttccaggacctttcaaagaggccccaagcccacatgagggacagtcagtggctacaaattctcagaggagaatgtatcagtctctacctagggcaaagcttgtgtgccttcagacggaggtttttttctagttcaccaggtaccttgccagagacctggttctacacaaggctgttgcctgcccaattcccccacagcatagtccccatcccccaggccaagtgatacggtgtggctgtgtccccacccaaatctcatcttatattcacacgtctcactaaaaatacaaaaaattagctgggcatggtggcacatgcctgtaatctcagctactcgggaggctgagacaggagaatcacttgaacccaggaggtggaggttgcggtgagctgagatcacgccactgcactccggcctgggcaacaagagcgaaactctgtctcaaaaaataaacaaataaaatgaataaataagtaaataaacatgtacagagtacttgagggccaggtacagttctatgttttatggatcttaatatccacataacaacccaattacaagcataaaactgaggcccagagaggttaaataactctccctggggtcacacagaaagtggcagagcggggacagataagcaggcagcctggttcgaggccgcgctgcaaacagtaaacagtaaacactgtttactgaatggtgctgagggaacatcagaactatgaggttaagtgctattcggtacagaaaggcagagggactcatgcaggacacacaccacgtaaacagcagggcaaggatctgagtgcacgaagtctttatctagaagcagaggttttggcacttgggcagtaatgacaagaagggattccggctgggtgcggtggctcacgcctgtaatcccaacactttgggaggcca[134 bp omitted]aaaagcctg[221 bp omitted]ctgagaggcaggagaatggcgtgaacccgggaggcggagcttgcaatgagccaaaatcgtgccactgcactccagcctgggcgacagagcaagactctgtctcaaaaaaaaaaaaaaaaaagaaaaaaaaaacggattccatgtataccccctgtagcctgtagtagcaaccagatgggcatgtcccgggccagggctcgcctatccactatcctgctgcatcctcacaagaatcctgggagataagttctattagtatcccatttgataaatatggaaatggaggctcatagaggtcaagctgcctgctcaaagtcacatggctaataagcagcagtgccaagatccgaagccaagagtgcctactctgtggcagactgtgccatcagggaccccttcgtatcacaccctgtgcagttctttcccacacccactgtggtctgtgcctggagctgctttgaccaatagtgtggtggaaatgacgctggaagattccaggccttgcccttaaataacctgcagcttctgcttcttccctcatgaaaatctggctgttggggagtcctgagcagccatgtgagatattcagctaccctgcaggaaagaccacgtggagaagagaggcccagaggctacgctgagagggaaccaactccccagtcccagtgccagttccagatgactccagcccagccacctccacctgcacctggatgagagcctgccaagcagcaaccagcaaaagaactgtccggctgagcccaggcaagccacaaaggtaacagaaactaagagtgactgggttttttgtttgtttgcctttttgagacagggtcttgctctgttgcccaggctggagtgctgtggcacgatctcggttcactgcagcctccacctctctcaggttcaagcgattctcctgcctcagcctcctgagaagctgggaccacaggtacccgctaaatttttgtatttttagtaaagaaagggttttgccatgttgcccaggctagtcgcgaactcctggcctgaagtgatccacccacctcaacctcccaaagtgctgagattacaggcatgagccactgcacctggctaagagttactacggtaagccaccaagctttggatcagatggctatgtagaaaaagaaaactgaaaccaagtccatggcctaaattcataagaatggccacagagctgagcacttctgaaaaaatgacctcagcaacctgaatgaatgatcatggtgtatctgtttcccacggccactataacaaactaccacaaatgcagtggcttaaaacagcacaaattattattattatttgagacagggtcttgctctgtcacccaggctggagtgcaggggtgcggtcacagctcactgcagcctcattctcctgggctcaagcaatcctgccgcagcctcctgagtggctaaaactataggcatgcatcaccatgccccactaattgttttttatttttagtagggacaaggtctcgctttgttgcccaggctggtcttgaacccctgggttcaagtgatcctcctgcctcgaccttctaaagtgctgggataacaggcatgaaccaccgcacctgccctaaatttattattttacagttccagaagtcagaagtctgaaatgggggccagttgtggtggctcacgcctgtaatcccagcactctgggaggccaaggcgggtggatcacctgaggtcaggagttgaagaccagctggccaacatggtgaaacccccgtctctactgataatacaaaaattagggcatgcgcctgtaatcccagctattcaggaggccaaggcaggagaatcgcttgaaaccgggatgcagaggttgcagggagctgagatcatgccactgtaatccagcctgggcgaccatgt[137 bp omitted]atggtgaaaccctatctctactaaaaatacaaaaaattagccaggtgtggtggtgggtgccaggtgtggtggtgggtgctactcaggggactgaggcaggagaatcgcttgaacccaggaggcagagattgcagtgagttgagatcgtgccactgcactgcaatctgggcaacaagaatgaaactccatccccccccccccaaaaaaaaaagtccaaaatggctttcactaggctaatctcaaggtgtccgcagggctgtgttcctttctgaagtctccagtggagaatccatctcctcggcttttccagcttccagaggctgcccgcattccttggctcatgcctcccttcctccatcttcaaggccagcggggcagcatccctcaaatcattccctctcttgcctccctctttcccttataaggacccctgtgatcacactgacctgacctgcataattcaggatcatctccccatccccaaatccttcatttgatcacatttgcaaagtcacctttgctgtgcatggtaacatattcaacaggttcttgggataaggatgtggacatctttgggggaccagtcactctactgcctactgtgtgtgataaaccagaaaaaggaccagtgcgcgccaaaggaataaacacagatgagctggaattttcctactgcccagagatatctcacagcctccctgggagcaccaaaagtgcactttgcaggcatggcctcaacctgcctaacatcaccaacctcctttacttttgggttaaaataatttaaacaaaggaattctgtgtttaaaaagatctttgcctccccaacagggtgcatcatcgatgatttatgcttctagcatgtactgttctttcctcaggcagccacagctactgctccagcctctcctgtgagacagctgggcgcagcctgctgagtcaaaagtatctcagccaaaggtacagatactggatttgctggtcagctcaggacgcctgacctgagagaaagcagggccgccagtgcaccctgggaaattccaatcaccatggctgggggccacagcaaagggcaatcagcagtgtgaagacactaatgatgtaattaaaaggtgtaaatgtaagaagccagtacattgcaatatctggtagcatctccaactcgacctgtccctaactgagctccaggtctttctgtccaacctgcccctcctccagtcggctgtctcacacccaatccatgggaaatcctgctggctctaccttgtaaacaaatctactggttattcattactaagaggaaaaggaaaggttcttgacatggttacaccttaaccaagcgatccaaatcaccatcacaaatgacagaacaaatagacctcaggagtcccctgaagggatgtccttaggaggcacctcgagtctgtggtgttcccgccaaacatgttcaacatgaatccaatcggggaagcaatcaggagactccagacatcgggacacactatcaatcagaggactggctccaatgtcaatgtcaaaaaacaagggcagggatactattctagagcagggtcagaaaactcttcctgtaaaggggcagagagtaaatattttagattttgaggccaggcgtggtggctcacgcctgtaatcctgaaactgcctttgcaaaattatgactgacacagcaaaagagatctaacttgactgactccatcttacttccaacctccaagctgtccttgttcattcctgagtgaaggctgaactaactttgggagaaacttagtttatagtttaaacaaacatggtaacagccctttcccaaagcagacctccttcttgcctggtgactagattgcctttgtaggactaacattagccacaagattagaaattatggtttaggagtcatgcagctggaggatacaagattctgaccctccctaaactgctcctaagatcagtgcttgagatattctgcagactctgcacttgatggatcagctggccccacccagatcaaaaaattggctcatctgatcttgtgcccgccctccccctcccccaccgccacccaggaactaactgagcacaagacatctctgaattcctatgatttcatctctgaccaatcagcactcctggctcactggcttcccctcacccaccaagttatccttaaaaactctgctcccgggccaggcgtggtggctcatgcctgtaatcccagcactttgggaggccaaggcgggcagatctcctgacgttgggagttagagaccagcctgatcaacatggagaaaccccatctctacttaaaatacaaaattagccgggcgtggtggcgcatgcctgtaatcccagctactcgggaggctgaggcaggagaatcacttgaacccgggaggcggaagttgtggtgagccaagatcacaccattgcactccagcctgggtgtcggagtgcgactctgtctcaaaaaataaaataaaataaaataaaacagaactctgatattgtccttctgctgcacagaaccctccagtaagtcctgttccactcagagtaaagccaaggcatttgcagtgacccacaggccccatacaaactgtccccctttcccgtcatcagtttcctctgtcctgtgtgccaggcacgctcatgcctcaggtcctgtgtgcatgcgggatcctctgggctggaacgtttcttcccccagatggcaatgctgctcgttccctccctccttggcatattttcagtgagttctccctgacaatcctatctaggcttatagccttcctttaaatactccttgttctacaaccctgatttttttcctagagcaattattgctatctaatatacttcatcttttaactattttttgagatggaatctcactctgtcacccaggctggagtgcagtggtgcaatctcggctcactgcaacctctgcctcttgggttcaagtgattctcctgcctaagcctcctaagtaactgggattacaggtgcctgccaccacacctggctaatttttgtatttttagtagagatggggtttcaccatgttgcccaggctggtctcaaactcctgacctcaagtgatgcaccagcctcagcctcccaaagtgctgggattacaggcatgagccactgggcccagccaactatttatttcatttattgtctggcttcctccacaagaatgtaaggtacctgagggcaagatgttttgctttttcctgcctgttgtatctataacatctacgtgacagccatgaccctatgccaggcactgacttaacattttatatccatttacttaatcctcaccacaacacaataaatattatttacagcataatgcatacatagtatatacacaaaataataataataataataatagtatctacctcatcataactggtgaggacccagtgccagaggctggaaggtgctgcagacaagccgtggcacaaagtacaagcccagttaatgtgaccattacataatacccaatgtacagaatcggaaattgaagctaagaggggctaaatgacgtacccaaagtcaccagtctgggtagggattcaaacctatgtcagtctgactccagaagccattttctttctttttttttttctttttttttttttgatatggagtctcgctctgtcacccaggctggagtgtagtggcacgatctcggctcactgcaacctccgcctcccatgttcaagtgattcttctgcctcagcctcccgagtagctgggattacaggcgcgtgccaccacgcccagctaatttttgtatttttagtagagaaggggtttcaccatgttggtcaggcaggtcttgaaatttgacttcgtgatctgcccaccttggcctcccaaagtgttgggattacaggcgcgagccactgcacccggcctttttttttttttttttgagacagagtttcactcttgttgcccaggctggagtgcaatggcgtgatctcggctcactgcaacctccacctcctgggttcaagcgattctcctgcctcagcctcccgagtagctgggattacaggcatgcgccaccacgtctggctaattttgtatttttagtagagacggggtttctccatgttggtgaggctggtctctaattcccgacctcaggtgatctgcctgcctcggcctcccaaagtgctgggattataggtgggaggcaccgcgcccagcacagaagcctatttatttatttatttatttatttatttatttattgagacagagtctcgctctgtcgcccaagctggagtgcagtggtgtgatcttggctcactgcaacctctgcctcccaggttcaagcaattctcctgcctcagcctcccaagtagctgggactacaggtgtgcgccaccacacctgcctaattttgtattttgagtagagacagggtttcaccatgttggccaggctggtcttgaactcctgacctcatgatccacccacctccgccttccaaagtgctgggattacaggcatgagccactgcgcccagctccagaagccattttctaaaccacaacgctaagaatgtcacagtgtttggaagacaggcagagacaggaaacaaactgggtctaggaattcagtgtccaaagtttcgcctctggcacaaatctctgcgtatgacctgagcaattaactgctgccctcaacacctccattttcccttctataaaccagaggaagtcattcctctttccggacatggggacaaaacagttgtgggggtcaaatgagatggctaacaggaaagcactttggtaactgtgaaatctaatactttcccattctaagagctgcagccccaacaaagaccccaccaaacaccgaacaaccaagaattccgggccctggaaagcaaactttaagcatccaaacttacagagggggaaaaaaagtgcactcccttaatcatgtgggctttgtgtgtgctcctccctctgccccagtgctttccttacgccttgtcctggtgttgtcctcacccttcaggtcccaattcagatgtctcctctgccaggaagccctccctgaaccccatgccatgtcaggtgcccagtgggctcccccatctcagctctgcccactgttgggggatacgtctgtcccccgcaggactaggaattccttgagggcacagattggtgctggtttggtccctgctgtttcgccagcattgccagcacaaggcctggcacagggcagaggctcacaaaataccagctaaaggaaataatgaatggatggagggatgaatggtgtgtaaccgcccaaggagttcaccttgcccgctgcctagacagagctgattcatcaagagaggagaactgcaagacaaagagtaattcacgcagagttggctgtgcgggagggtgttttgtttgtttgtttgagattgagacagtcttgctctgttgcccagactggagggcagtggtgcaatctcggatcactgcaacctctacctcctaggttcaagcaattctcctgcctcagcctcctgagtagatgagattacagatgtgcgccaccacacccagctaatttttgtattttcagtagacacgggttttcaccatgttggtcaggctggtctcgaactcctgacctcatgatccacccacctcggcctcccaaagtgctggaattacagacgtgagccaccgcgccccagccaggagtcttaccattactcaaatcagtctccctgagcattcagggagattttatttttattttattttattttttttttttgagatggattttcactctttcgcctgggctggaatgaagtgacgcgatcttggctcactgcaacctccatccccgggttcaagcgattctcatgctccagcctcccgagtagctgggattataggcgcccgccaccaagcccgcctaacttttgtatttttagtagagacggggtttgaccatgctggccaggctggttgcaaactcctgacctcaggtgctccacccccctcagccttccaaagtgctaggattacagatgcgagccaatgggcccagctggagcagagtttttttgttttttgtttttgttttgagacggagtctcggtctgtcgcccaggctggagtgtagtggtgcgatctcggtggagcagagtttttaaggataacttgatgggtgaggggaagccagtgagccaggagtgctgattggtcagagatgaaatcacagggagtcggagctgtcttcttgcgctcagtcagttcctgggttggggggccacaagatcagatgggccagtttattgatctgggtaaggccagctgatccatcaagtgcagggtctgtgaaatatctcaagcactgatcttaggagcagtttagggagggtcagaatcttgtaccctccagctgcatgactcctaaaccataatttctaatcttgtggctaatgttagtcctacaaaggcaatccagtcgccagacaagaaggaggtctgctttgggaaagggctgttaccatgtttgtttaaactataaactacaaactaaatctctcccaaagttagttcagcctttgcccaggaatgaacaaggatagcttggaggttagaagcaagatggagtaagttaacttagatctctttcgctgtgtcagtcataattttgcaaaggcggtttcagtggttctctgacccagccaatgatgctaaattcccttattttatgtcccacgtagcacaacacagatcaccttttttttttttggagacggagtcttgctccgtcacccaggctggagtacagtgttacgatctcggctcactgcaagctccgccttccgggttcacgccattctcctgcctcagcctcctgagtagctgggaccacaggcgcccagccaccacgcccggctaatttttttgtatttttagtagagatggggttt[144 bp omitted]agccctttatttctatttattattttttgagacagtcttgctgtgtcgcccaggctggagtgcaatggcacaatctaggctcactgcagcctccacctaccaggttcaagcgattcccctgcctcagcctcccaagtagctgggattacaggtgtgcgccaccacacccagctaatttttgtatttttagtacagaccgggtttcactatgttggccaggctggtctcgaactcctggcctcatgtgatccgcccgcctcggcctcccaaagtgctggtattacaggtgtgagccaccgcgccggaccttactatgccctttagatctgagctcgggcggccccctctaggcagccctgctggcctcaggtccctgggtcagccagttcctctgagctccggggctcccactttcccgaccactctgggttgacagtgatggatcaggagtatatctcccagtgctgagcaaaaaggccgcatagtctgtcaaccgaatgaaaggacggcgtatgagcgcattaatgagtacacagatgaatgtcctctctggctcaaagtccttttccggattcccaggccatgtctccagaacccagacttcacccccgaaccatgcccctaatccagacttattgactacagtaaaactgaggcacgtcgacgtcctaaacggaggatatacaagcacctcctagatcagtggggaaactgaggcacacggtgccgcttttgaaatgaagttgcccaaggacagccgggcaaaggaccccgtccggtttctcctcagcccctcccctagctcctctatcctggaaagccccgtccaaatttctcccatctctcacactattggtttaacagggcatcagtctccaagcgctctcttcctttatcggctggcatttcctactcgcgtggtggctccttgacccgccccttacgccccgccccgccctcactactgggccacccgtacgcccctctatcagaaaccccccactattggccactggactttgccggttcgggctgtgattggtcgtagacagaagtccatcccctaagcaaccacctgacaggggttggagaaaggaaaaaggttggagggaattcgggtcagactcacgttgagccggcgggaggcagatataggtcttgaagaactcgcttcggcgggcggcctccttaatacggttggcaagcggcttgctgacctgccggatgcccaagtatagcagcttcgccatagggaacgcgcccaccaccatcttggcggtctcacagggcacgcgcaaccttgctgactgggcggggcgcctcaacctcttcactcctcccccgccctctcgtggccatgcgtgcgtcagtacgtatgtacgtacgctcgagggaaacttcagaggcgcatcctgacgtcaccccgtcgacgctggcgtagcgacgtccgttcgctgaatatgcaaatatacacggaagtgaggcgggtcagggggcggtgccgttaaacggatgctggaaggcgtgtggattcccacgcccgccttggccaacgtcactgtactccttcgtgatgtcacgttccgagttggcgtccccacccaaaggaggctcttaattagtcctaattagtcctatgagccccaaatacaccttcctctgcaagctagggctctcattgggattaagaggaagccgcgcggtcatacagactttggctgggatcccagctctgccatttcctcgctgtgtaatattagatgagtggcataacctctctggacttcagtattaccgtctaccaaatgggaatcctaatagcagttgcctctttgggttgttgtgaggcttctatgctaatcttgagtgtaaaacagtggaccatgggaagtggttagaatggtgccattcatatagttaagcgctcagtaaatagcccttcttactatacaggtcatgattgcattattaatgctaaatccagcctgagggtgcatttcacccccagaagcagcgaatccaaccctttcccaagtaactgacaaggaaactgaggcccagagcagggcagggggtggcacaaggttcctgcagaggttgatagcctggcatcttggccaataaaaccatacccgttctcaagcaacccaacttccttcattaggaggtaggttccccagggagctagttcagaaataaatttaaggacatgtcccagactgtcctttcttacccagcagggagtaaaatcatataaacaatgtcaggaaggggttgagagaaattcctggatgatggagtgctgatgggtaattgagagat[135 bp omitted]catcgtgaaatcccatctccactaaaaaaaaaaaaaaatttagccgggcatggtggcgggcacctgtaatcccaggtactctggaggctgaggcaggagaatcgcttgaacctgggaggtagaggttgcagtgagccgagatcacgccgctgcactccagtcttggcgacagagcgagactccgtctcaaaaaaaaaaaaaaaaaaaaaaggaaaacaggaacagaggagtggtgtgtaggaggaaacatacattcaggacacagaatcagggggctctggacttctttggtatccagtctgactctctgagtgtcctttgtcaagctcctggcactgagggacctgcgtttcctcatctttactgatggtgctggtgtgtgtgtgaaccctgatattctgaattactaagaatgccaggattccataaaaacaaccttttccagggtcccttccacacggaaggtatgcagaaacttgggactacctaaggtccatcatccatttgggaccagcccccttcccattttacagatcgtttgagcctgggaggttgaagctgtggtgagccatgagctccactgcactccagcctaggcaacacaa[136 bp omitted]cacgatgaaaccccatctctactaaaaatacaaaaaattcgctgggcgtggtggcgcacacctgtaatcccagctactccagaggctgagacaggagaatcacttgatctcgggaggcggaggttgtagtgagccgagatcgtgccaatgcactccagcctgggtgacagagcgaggctctgtttcaaaacaaaacaaaaaaaattggccgg[131 bp omitted]tggtggcgggcgcctgtagtcccagctactcgggaggctgaggcaggagaatggcgtgaacccaggaggcggagcttgcagtgagccgagatggcgccactgcactccagcct[155 bp omitted]tctactaaaaatacaaaattagcagagcgtggtggcacatgcctgtaattccagctactcgggaggctgaggcaggagaattgcttgaacccaggaggcggaagttgcggtgagccgagatcgcgccattgcactccagcctgggcaaccaagagcgaaactcagtctcaaaaaaaaaaaaaagagagaaaagaaaaattctggccccatcacctccattcccatagctttacagcagtgggatggggtgggaagactactaggcctcccagatcccaggcctccctctcttctctagccctccagcccaccaacaccaaagccctgatttccgccatctctgtgctccctccaccccagaaaaatcattgagtgcatttttccccctattcctctcctccttcttcctttctctgagaagggttcccgggaaagtcttctgggaacctttgtgaagggagaggagggcccgggggagcggggtggtaggagggttgtgagtgaatcttcacacctcaggagtctgtttacacacccgtaaggaggaagaggagaggagaccttctctgaagggtgaggccttttcagagctgggtgcttcttcctgctctccagcctggtcatggaacagtggccattcctggtgacccctgagaccaggggagggagggcagccttggccatcctggggcatgggaacacaagcagagatggggaggggagagggaacccaagatggctccagcgctgactcaccagccatgggaccttggactggttgcctggcctctctggtgaccgccctagactagggcctgggatccttcctggaagttttttctgctcacagcccctagtcacccttttcctggaatgagtgaggtactcgtgtttcataatccctctggcccctgtgcttcttccattaaaataaatccaaggctgggcacggtggctcaagcctgtaatcccagcactttgagaggctgaggtgggaggatcacttgaggccaggatttcaagatcagcctggccaacatggagaaaccccgtctctactaaaaatacaaaaattagccaggcgtggtggtgcatgcctgtaatcccagctactcaggaagctgaggcacaagagttgcctgatcccaggaggcggaggttgcagtgagccgagatcctgacactgtactccagcttgggcaacagagcgagattctgtctcaaaataaataaataaacaaacaaaaataaaactccaaaagctgatcactgctccttgttaaatccacaaccaccacccacccggcccaactgacagcacctccctcttggactcctgcagtcacctcctcactgggc[134 bp omitted]ggtctcagcctaccaagtagctgggactacagacacataccaccatgcccggctaatttttaaaatttctgtagaaactgggtctccctatgttgcctaggctggtcccaaactcctggcctcaagcagtcctcctgcctcagcctcccaaagtgctgggattacaggcttgagccactgtgcccagccaatctcccatattctactccccactcaacagcccgtgggatactgttaatacttaagtcaaatcaccttcatcctctactgagaaccccctcatagctcccatttatctcagattaaaaggcagagtcctcactaggatttacatggccccacacgacctgctgtcccctctcttgtctcatttcccctttcctctcgtcctctctacctcctctccagccacactgccatacctgctatctttcaaaattcagacactctattattattatttgagatggagtttcgctcttgtcacccaggctggagtgcagtggcacaatctcagctcactgcaacctctgcctcccgggttcaagcgattctcctgcctcagcctcccaactagctgggattacaggcacccaccaccacgctcagctacttttttttgtattttagtagagacggggtttcaccat[137 bp omitted]tgcagttccctctgcctgaaatgctcttcccacaacagccacaaggctgagtgccgcccatgcttcaagtctttgctggaaagccacctcagcaagcccttctctgccctcctccagatcagactccaagtcatcctctgttccctcaactggctttacatagaaaaatgtccccttcccatttagcaattccaaacattacatattttttatttacttgtgtatggtgagccctgtgaaggcaaggccaggctgcctcagtcattgttgtgtccccagccccacccagcacagtgccctacataaacctctgttgaatgaatgaataaataccctttcttcttgtcccacaccttcttcccaaaccttctggcatcactcctccaggcagtctgccctgattgcccttcacttgagttctgacattctccctcttcatcctcagtcttgacttggagatcgctgtttatctagaaacttagaattgcggtcttatgttccctggcctgtatgaccaggggctttgcaaacataatgactctatatcggctgcatttctccttccactttcccccgagtcacagacttttatccacttgttggaaaaaaaaaaatctaaccttctctatttgtctttattttctggaaaccaaatgtttgacttaatttatctggccagacatggcggctcacatctctaatctgagcactttgggaggccaaggcaggaggatctcttgagcccaggagttcaagatcagcctgggaaacatagtgagactccatttctacaaaaagtacaaaaattagccaggcatggtggctcacatttgtggtcccagctactcgggaggctgatgtgggaagatcgctggagagcccaggaggtggaggctgcagtgagccacgactgcactactgcactccagcctgggcaacacagtgagaccctgtctccaaaaaaatatatttactcatctcctccttcaggaggccctccacaatcgccaaactgtgatgggatctgggagcacaaaggttgaccagtgacacaccaacctcactcttcctaagttcttgtattcttatgaatattaacacagccctttttccatacaatttgcatacaccagaccaggagagaagggactgtgggatgagaggggaaaactggggattctgtgccactcggggttcattgtgctggcggcagcatcttcagctgcacctggtccccctgggagggcggagtggccgcccagctgccagtcatggctttggctgtgctgttcctcttggaggtgagtggggtctccagggtgagcgaggcattggccatctcctggggcttgtcgctggccagaaagcggagcaggttgtgcagggccttggccacatcgctgcgggcgccctcgttgaccaggcagtagaggatggggtccgccacacagttgaggctggtgaaagccagtgagctgtggtatgcagaaaagacgcgctcctcgaagccgcagtcccaggggcggcccaggtagatggcgctgcgggacagcaagagcacgtgatagggcgcaaagcagaccagcacgatggcgatgaggctgagggccagccgcttgatcttggccttctcctggcgctcggtggacacgctgccccgcacggcccgcaggatgccccggtacgacagcagcatgagcgcccacgggaagaggaagcccacgaacacccgatagaggttcatccaggccacccagccttccatggggaacttctcaaagcagaaggtgtggttgtagcggtctcggaagagctcgtcatggaacaggggcgccgagttggcgcccagctccgtggcccagaccacggagctcacggccacggcggtcttgacgcggcgc
